United States Patent Application Publication US 2008/0113342 A1 - sequence listing, part 8

SEQ ID NO: 25999 - DNA, 1492 bp, Arabidopsis thaliana
tatccactctcagtccatatatcactcaatacttcaagaaaaatagattcttcaagagagcaaaaaaatcaatggagagagcaaagtcgaggaagcctcatatcatgatgataccatacccacttcaaggtcacgttatcccttttgtccacttagccatcaaacttgcttctcatggcttcaccatcactttcgtcaacaccgactccatccaccaccacatctccaccgctcaccaagatgacgccggtgacatcttctccgccgctcgcagctccggccagcacgacatacgttacaccaccgtgagcgacggcttccctttagactttgaccggtcactgaaccatgaccagtttttcgaaggcattctccacgtcttctctgcccacgtggatgatctcatcgccaaactctcccgccgtgatgatcctcccgtgacttgcttgatcgccgacacgttttatgtttggtcatctatgatttgcgacaagcacaaccttgtaaatgtctcgttttggaccgaacctgccttggtcctcaatctctattatcacatggatctcctcatatctaacggtcatttcaaatctcttggtaacactcttaatcatgttaatgatatgtttattacgtagtataacctaattatatttatatttttttaaaaaccaaaattgtgaggattgtcacaactcataggtatttggaaatttgtgtattatctcagaagaaaataagtggaaatttatatttacatcatttttgtttttgaactttgtggtagataatcgtaaagacgtgatcgattacgtaccaggggttaaagcaatagaaccaaaggacttgatgtcatatcttcaagtaagcgacaaagacgtagacacaaatacagtagtatacagaatattattcaaggcctttaaagacgtcaagagagccgacttcgtcgtatgcaacacggtgcaagagctcgaaccagactctctctcggctctacaagccaaacaaccggtttacgctatcggtccggttttctcaactgattcggtagttcccacaagcttatgggccgagtcagactgtaccgagtggcttaagggccggcccactgggtcagttctctacgtctcgtttggtagctatgcacatgttggtaagaaggagattgttgagatagctcatgggcttttgcttagtgggattagtttcatttgggttttacgtccggatatagttggatccaacgtaccagattttcttccagccgggtttgtggaccaagcccaagatcgaggtcttgtggtccaatggtgctgccagatggaagttatttcaaatccggccgtgggagggtttttcacacattgtggatggaattcaattctagagagcgtttggtgtggtttgcctttgttgtgttatccacttttgacagatcagttcacgaataggaagcttgtggtcgatgattggtgcattgggattaatc

SEQ ID NO: 26000 - DNA, 407 bp, Arabidopsis thaliana columbia
ctgttacttctgaaaccgatgtgaatttggtgggggatagatttttttgtggagtcaatggatttggagagtgaaagctctgcacttgagtctgttgatgataatgttttgattcaacaaagtgccagcaacgtttgtgatgatggtaggagtttggataacgggtcttgctctgatgagagtgtgaaactgctttcgacttctaattctgttgaactcggtaaacctatgagttttgattcaccaggtgatggtggtggtgcttattctccggttttgaaaggacaaggcttgagaaaatggaggaggattaggagagatcttgataaggacacgtctgcgaatatggagaatagtacagctctgaagatagggttgtcaggtgttgctcattcacatggtaaaca

SEQ ID NO: 26001 - DNA, 918 bp, Arabidopsis thaliana
gcttttggaaattaataaagttcatcgaaatacaaatatctcttcatcttttctcttttgctcatttcccagaaacctttgtttcatttgcttcgtgtgcgatcgcgagaacaagggaaaattagggtttatatcctcaagctttttcgaacaccattgatcgttgatctaagatttttcttctagtcgagtttcttaaggtctggcttcatatctctctgtgcatggtgtcgttaaatctatgcagcgatgtcctgttcgatttcattttgcttctagggtttaatgatttgtgcatttgttcgttttagggaacgattcttctcagctttgtgttacttcatcgtgattttgttttgttactacgagtcgtttctatttcttagattattcgattagctgaggttttttgaagattcttctacagataactacttctctcgaatcgatttgcatttgttcttcatttttagtatttggatttgttgactctttctctcatttcttacatgcatagctgcaacttatttatggaaaacgaacttgttcgaactgatatttattacgatatccaggggctttgatcaaactcaaaattgaagaccaatactttgaaggattctggtaaagctaagcaactatgagttcaaattcatgggctgatgtttctgaatcagagagggcaccatctggtggtggttggggttattctcgtccgtctcgaaccaactatgttcctccacatcttaggagccgtacaccatcttcggagtttgttgctccttcacctggtaataatgatcgtgggggatatggtggtcaaatagtggttatggtggtcgaggccaaggttatggtggtcgaggttcgggctatggtggtagaggaggtctgtgggcggttggaatgcagaagtgg

SEQ ID NO: 26002 - DNA, 766 bp, Arabidopsis thaliana
cgtctgaattattgttgagcaaaactatgtcttttagtcaaaagaagtaacattacacatttaggccaaacatgtataagatcaataaggcatcaaattcaccacaatgaataaaaaaacaatagtttgataaagagttgctaaaaactttaatccttggctcttacacgaaccttattacatctttcatctttggttcaattgaaagatttaagcaaaacatatggtctacgatctatatatataacacaacatagttcacattaatgaaagtacagaaacagaacctcgaatgtccgtcaaggaggatcagaggacgacaacttggcatgagctagagcgtcttggaatggtaagcagttctctgaggatgacagattcctttctggaacaaccatccaaacatagagtgactttcttgaggactggtgagtctcaatgaagtaacgcactaatttcatctccaacttgtcccatgacgattttatcttaacatactcgagagatgataggagacgccgaggtcgagataagatactagttctcttctttgtataataatcagattcctgatattacaaccaagtgaacgaaacaagttggagtaattatgatactttccccatttgcattgttataccaaagaaagtacttaatgtttaagtaaacttaccacgacaagagagttcacattcgggcagctctcaagattaaatggcgatatttcccactgtcctgatagaattcaacacgcagcaaagatatg

SEQ ID NO: 26003 - DNA, 578 bp, Arabidopsis thaliana columbia
tatatatatattcattttttaagaaaaatcaatactcttgtcatgtacatataatattcaaattctagttttataatgtagaagcttactaattaaaaaaaaaaccattcctttttggaagataaattctaggaaagtagcgactcaatagtcaagagaatgaaagcaaagaacaacaaagttatttgacaccacacactcgtatgcataaatacgcaaaaccccaaagaacttcttcaacttctctcctcaacttttaagtattccacacatacaaacacacacacacacttgacttttctcatataatttcgacagctcgtgaaggacaaagacatggagccttctcggaggagaatgaccagagacatgttgcttctaatcgtaacgatggcatggctcgtaaccggagacgaaggaggcataaagcaagaggagcgactgtttaatcttgggaagcttgagatgttcgttgacaagcttcctcatataccaacacttcatggctaccacttcgtcaatggcttctcaaacccaaatctcttcacataggcatgttcttcaagaaatgggtattt

SEQ ID NO: 26004 - DNA, 575 bp, Arabidopsis thaliana columbia
gaatttatttttgtttttccttttttccgaaaaaaacaaatgagcgaccaatcagtgcctaccacgtaagatgaaattgagtatcaaaagtatcaatgggctgatacgactcaacccaattttctgtatttggtctattaaaaaattataaatgggctattgatactctaaaaatataagcgatgtacatggttttatggacacagtttccgtaaaaagatgaatgaactttgttaaagtaacacataaaaatagtcatataataacagtatttaagagtacaaagtttaaagggatgcccaaactattactcttgtagagttttaatccatatgctctacattctctacatggtctataaacgtataaatccttgagttttcagccttcttattagcgatattcccaaactggatttcattttttgccgcagtgttgttcaccggattatagtagacaatgtagaaaggatagtttagatggcgtgtagataacacaatttcacctccactagtcatcccaacaatgtatagagatttatcacaagtttctccaattaaaagacaatgtgtaga

SEQ ID NO: 26005 - DNA, 349 bp, Arabidopsis thaliana columbia
ggatcccacagccaccacatatacaagatcgttttgagggtataaatctgcgtaacgatcccataatccatattgcctaaatctgcaataattaggagttttgaatttggtcaaactgaaaaaggaaaaaaagtttaaacaaaaaatcaaccaaattaaattctgaactatacgaagatatatcaaactagttttacatgcgaagaattatatatagtaccaacctgtcttgaagtgggttgccataaagctaatccaccatgtaaggtaaggaatccggtatatagaatccacctgcggtccaatcggtacaacgaattcccaccaatgttgaaccgtttctcggcgg

SEQ ID NO: 26006 - DNA, 529 bp, Arabidopsis thaliana columbia
tgtatctaattgtcaccttccgttgactcagtttagctcttgtgttttagatcattttagactcttgactcttattcattctcttagtagttgtagttgttactatcttgagtcttgattgttcttatatggaagttttcaggcgatggtcattggaagctatggatttaaaactgactttgattttccatttttctttgaagaaatttctatgtggcgggaggctaatatttggtcctgatgcatcatctctatatctatcaaccatcttgatccttggtcctgctgtaatgttctttgtcaaaatgtacactaaaatggctgatcctcgtaccaagaatccaaatctatgtattccaattctctgtgtgtcttggatactcacaattttggtatgtcttctgctttcgaactttctttaaatgatttttttgtgtgtaaaaagtgaactacagtttcaatagctttcctcaggatatatttatcctctcaatgacatctagtagagacccgggattgtgcaagaagt

SEQ ID NO: 26007 - DNA, 430 bp, Arabidopsis thaliana columbia
tctagtatatctatatgatctctctatctatatatatgaatgtttggactaactcatattttattttaatataaaacaggggaacacgaatttatagtgattgtggaccgatcgcgttcatagaacagcgatatgcgagtggtgattgagttatcatttggcgcagagtttgagattgcctaaggcagtgatgagtacaaaagacttatcagtcgattgcctgaggtttacgtcgcgaaaaccgagaggcttcgatctctgatccagatattgtgcatagcggtaaagaaatgcttgagagaccagcaaatgcatatggctccttggaggaagcacgagtacatggaagcccagtggctttgcacatgtgatcgatctagctccttgtaagcttcggtttccgaggccatggagccaggctattgggtgc

SEQ ID NO: 26008 - DNA, 472 bp, Arabidopsis thaliana columbia
tcttacttgggccagaagactcagatggaagcagcaaaccaagccaagatcgatgtagcagaggcaaagatgaagggagaggttggtgccaaagaaaggactggactcacaatccagaatgcagccaagattgacgctgagtcaaagatcatctctactcaaaggctaggagaagggacaaaagaggagatcaaggtgaagactgaagtcaaagtgtttcagaatgagaaagaggctcttgttgctaaggctgatgcagcacttgcgattcaaaaggctgctttgtcccaaaactctcgtgtggctgaggttgaagcagccaaggctgttgctttgagggaagctgagcttcagactaaagtagagaagatgaatgcattgactcggacagagaagcttaaagctgagttcctcagtaaagccagtgttgagtatgaaactaaggtgcaagaagcgaactgggagttgtcaa

SEQ ID NO: 26009 - DNA, 519 bp, Arabidopsis thaliana columbia
gctcaccaaaaaaactacttacataaataccatgttcttttcttggacgacctcttggtcgtgttgcttgaggaggggcagttggattatgacacctagtcttattatgtccttcttttttgcagtttgaacatgttataatacgaccatggcgagataacttgtacttattagatgcagactcatgtggagactttctcctagcatgatcatgtggtcttcctctgttgaatctaggtgggggtggcagaacaggtaaccttcccaactgtggccacatattcatcccttggactggtttaattcctttctcgtacaatgaacgccatcttgaagtcaagtaataatcagagacataatcattaagatttaactttgtggtgttgatgacacacattgcatgcatacaaggtatgccattcaattgccaatagccacaaccacaagttttcttttccatgtcgacacaaaaaatatcatctccacattcaatctcatgcaagtaacctgtggtcatgt

SEQ ID NO: 26010 - DNA, 458 bp, Arabidopsis thaliana columbia
acatcttgatttacagttaggacatggagattcacgtgaagcatcttgagatagttctacaactactacagttacacaagtttttcgtgaatgctaagaaatgtgtatttgggagtagcaagatagcgtttttgggacacattatatcatcacaaggaatggaggcggatcctgagaagatagaagttatggttaattagcctcagccaaaatctgttacagaactaagagggtttttgggtttaactggctactacaaaatgtttgtcaagagttatgggctcatagcaagacccctcatagatctcttgaagaaagatggctttaaatgggaggacaaggcgactcaagctttcaacaagctgaaagaggtcgtcactcagctgcctgtgctagtactacccgatttccagaaggagtttacagtagagactaatgcctcatgtactgagataggg

SEQ ID NO: 26011 - DNA, 599 bp, Arabidopsis thaliana columbia
tagaggatggatcccgagaaggttccagactccacctatgacatgattggtggtcttgaccagcagattaaggaaataaaggaggtatgcttagtgaatgagaaaccgaaactaaaagtcactacagtattggctatctcctctgttgtttcatccttttaatgtttatataatatctatatcttttctggtttatcaggtcattgagctgccaatcaagcatcctgaattgtttgagtctcttggaattgcgcacgcaaaggtacacttgaatcttaaaccttcttctccatattgtgatgatgctaagtggattagacgtaatctcatctctctgtctttctagggtgtgttgttatacggtccacctggaactgggaagacactattggctcgggctgttgcacatcacactgactgtactttcataagagtttctggttccgagcttgtccagaaatacattggagaaggttctagaatggtcagagaactttgtgtgatggcaaggttagtatatggtagtcctattttagattcaagcatggtcatagtggttgataggaaatatggactgttgatagatacatcttttacat

SEQ ID NO: 26012 - DNA, 719 bp, Arabidopsis thaliana
  unsure (1)..(719): unsure at all n locations
tataacccaaaaataattatttatgtattaaatattagtttaggcctaatgagtaccatgtgaaagagtaattgttctactttctatttttgtatttcatataaagtttaatcttgttcttctgaattagtttgtattatgtttacttacggtcaaaagaatctgttagttactgtcaaaagttaaaacttgattgttctgtcttaatttgcaggtggatcttcgagacaggtctgctcttgagaagatattctcagaaacaaagtatgattgagaaaaaaacaaacattcttttagcttcttcactttatcactaacaatgagtgataatgcatattattgggtttattctttattgattgatgaacgtggaattattattattttacaggtttgatgcagtgatacattttgctggacttaaagcagttggtgagagtgtagagaagcctttgctttattataataataatcttgttggtactattactcttttggaagttatggctcaacatggctgcaaaaatgtatgtataatttgccactacacaacaagttcgaatccatttttactttgcttgatcaattctcatgattagctacttttactctgtttccagcttgtgttttcacatcagcaactgtgtatggncnccaaaagaagtccttgtacagaggagtttcaattctgctttgaaccatatggacgacaaaggttg

SEQ ID NO: 26013 - DNA, 429 bp, Arabidopsis thaliana columbia
aagactatggagctttcgatgtttggcagagaagataccaactcgtcgcagtggggcgaagtgcacggtccattcatgctggaagagattgtgtgccaggcacaaaacatgctgacctcaagaggcattttcatgaaaagtaactctctcaaatacgcattgcctcttctattgctacaaatgtcagtcatcatcgtcagctctaggcgtatcttccgcgtcctatcaacctttagagcaatggaatgatctctgctcaagtcttggtataactttcacatagcgcattcactagctcgtattgcggacatatacgtgtaagaacattgtcatgaatgtgtaagtgtagactggtgttgtgttaggatcgtctttcttaggacataatgtgatagacatgaacatgtttcatcccgcgggaggcaagat

SEQ ID NO: 26014 - DNA, 545 bp, Arabidopsis thaliana columbia
tagtaacggccgaggatccccgtttaagtgagttctaaacttctaaaagaaaagcagaataagaaaagaaaaaattatattatcaaacctggcaagcttggagtttggattccattccatcaatgtaagcttcacaccgagcaatctgatcttctttctctcgtttctcttcttttgtctgtcctactgtctgtgtcaattgcctgatttgatcctcaagtgacttgcgtaattcctcccgagttacattctcagtggcataccgtttcaactcttcttcaaatcttttccgagctgcctctgttacctttagcttctcggttagagcatttttctcttttcctaccttctgtatcattcacaaagaaaacggcatcactttgttaagtgagcaatacaatttggacaaatggaatagagtaaacgatacaaggcacaataactgtaatataaagatctgatcgttattcattttctgcaaacatttactccatattttatttcaagtctgtacccttgagtcatcacgctttcgggttttttgc

SEQ ID NO: 26015 - DNA, 761 bp, Arabidopsis thaliana
ggatggggcacatttaagacccacaagcaaaagtttcttcatcatttcttcatcaaactcacctttcaatctctcatccacagcttcaagaactcttccttcactgtgcaatctccaaacccaatccactagattcactgtcttttgactctctggttctttatctattggccttctcccacaagcaacttctaggatcaccactccgtagctaaaagcatctgttttctcagtcgctgtgccgtattggagatactctggtgcgaggtaacccattgtaccagcggttaaagttgagacagggctcttatcatgctccgtgagtctagctagaccaaaatctcccagccttgcgttgaagtttatgtcaagcattatgttgctcgtcttaatatctctgtgaaccacttgctgctcacactcatggtgaagataagacaaagctgatgctaaaccaatcgctatattcagcctatgagaccagtcaagcgccacagctcctgtttgtgattcttgatacagaatcttatcaagacttccattaggcatgaactcatagacaagaagcaattcacctttctcgttacaccaaccctgcaactgaacaagattcttgtgccgcaagcaagcaataatcgataactctgccaaaaactctgttttacttcggttgaattatgcctcgatcttttcacagcagagatcgtcccagaggaaacaaacatagctctgtaaacattcccaaacgctcctcttccaat

SEQ ID NO: 26016 - DNA, 774 bp, Arabidopsis thaliana
gccttcattgatatcgtaatccactatatggattcgacgttcatacttcacagcttcaagaatagcctgtgtggcagtgaggtaaccaaagttgacatatggagacatgttttgcagcagttcgaacgctgagatcacatccgcctgatcatagacatcatcacgatgttgttggggacacagaacactatctcgttcgagcaactttgaaagtccgttggtgaagtgagcagctaacctctccatgttagttcggtcaccaggagaaaccaaatctttaagccttgcaagtataacccgagttagctctctagacttgttcgcaccagttgacgcatcagcagcagccacaagtaagtgaaccaacctcaagccctttgattcatcagtcttaggctcaccaaaactaaccccatcagccacagacaaacccgttgacgcagagttacaaagtccctcctggtcatgaagcattggaacagcttccgattccggttccatcatggctccttcatcacccataatggattcaatgacatcacggaagtcacagtcccaatcaatgtcaagatcattcaagctataaccattcgaagaggtgcttgcagccgtgccaagcgggtcagtgtgggtagagaagaagaggtccaagaagtcctcgtaaggataattcatggtcatgcaggtaaaaatgaagaaacgggcaatgcagaattatatagatagtgtagtaggacccaagagagtacgagttccatatttataagtaaatct

SEQ ID NO: 26017 - DNA, 1511 bp, Arabidopsis thaliana
caaaaggcatcccctgcattatcaacatgactctatagtaagcatcgagcatggtcacaaaatgcaaatagttgtacattgattaaatttcaccaacaacagtgaaaatatgataataaaaattggtccattagaacgtagagtatctattttaataaaaatataaactgcacaaaagcaaacagatagaaagatttacctttcagctgcttgctgcctcagtacaatgtcaagcactctaagtgcatcctgagcactcttatctggtgtataagctcctctctgagtgccaagaacagtcttcaacggtatttctgcagcataatgtatctgaaccttgtaacttcttggcaagaaagaacgttttgatcgcttgcaagtaccggaagaactaccaccatcagagacaccacaatcactataaacttaacaagactgcgttagttagaagatcaacaagatctatcttgacaccttgaaacgattaaatatcaatccagataagagggacataccgttttgaaaatgacccttccacgatgactagaaagtcaaattcgttctgtggtagaggaccaacagtatataaagtcttctctccatcatatgccaaccttttaccatcaagatcagaagagtaagtcttgaatagttggtccataagctttctgcttattcctgtcccatcaacagcatcaccgttttctgtggtgatactaacctgcaaaaaaggtaccgatatgtcaaacatctcacacacgcacagacactgatgaaagaatgcagaaaagtgactaatgaatcttacagtgtactggtaaaatactacatccggctgtctcacagaaacattaaagtgattggtgcacaattctattgggttgcctgtggttccaaccccacgtctagttgtgatgtcataatctcgatggctgggctgttctggttctatacttatgggtgacagtggcagagatgaagatgtctccatccttccaggggaaaataatctgcaagagagaaaagtggaggttggttacagtgtgcaaaaaccagtccaaaacacaatgctcaggagactaagaaagaaaagaaaaacaccaaattaagaagacaactccaaaaggtaaaaagctaaaaactttaccaccattgtcgttctaagattttaatttctgggcatatcctgctaaatcgcgagaaatggtataaatttcagatgaggaacaaacttaatctggaaaaaaaatggcacctttaactgttggtcgccttcaaaattgagaaacattacacaaacaaaaactcattcgagtgtgtcatacagtagcataacaagactttcaagagagaaacaacgcagccaaaaccatacaactatcaacagacaaatcctagcttcatgcaaattctccgaaagagagacaaaaacaaaacctagctccgaatcaacaacaattacaacagcgatatctagtgaaaacagcgcacctttgaaagaattaagaaga

SEQ ID NO: 26018 - DNA, 532 bp, Arabidopsis thaliana columbia
cgacgaaggacgcgtgatagacatgttttcttctgctaaattcatgagccttttcagcccaggcaacacaaccgttcccaagtcaggtctatctttccgtcttaactctgcgcattgtaaaccgatttttgctaatattaaagcctcttcaattggccaatcagtaacaagagggtcaagtatcttggcaaaatttccttcctcaattgctttctcaacttgatttgtcaaacccattggtgtctttgctgtaagtatttgcaagagcacaatcccaaatgagtatatgtctgatttggttccaagcataccagtttgctggtattctggatcaatgtaacacaatgttccagcagtgggatgtcattctataatgcgttgcgatgtcatcaattgtgggagggacaagcctagccaacccaacatcagaaatcttgctgaccatgtgctggtcaagtaatatgttagctggtttcaagtcgcggtgcactagtggctctggctttagctggtgaaggaaattaaggctagt

SEQ ID NO: 26019 - DNA, 789 bp, Arabidopsis thaliana columbia
gatctcccgtgtgtcttccctcttgttggtgggaccaagaaagctttaacggatacagcagcagaagaagcatagctgaattgttaagagagttggatgcagacatcttggctttacaagacgtgaaagcagaggaagagacacttatgaaaccattatcagatttggcttccgccttaggtatgaaatacgtgtttgcagagagctgggcgcctgagtatggaaacgccatactatcaaaatggcccataaagaagtggagagttcagagaattgctgatgtagatgattttaggtaatacaaaaaatctcttttgcttatcttacattgattttcctcttcccactatatcattgttgatgtaaatgtcttttgcgtgtgcaggaatgtgttgaaggtgactgtagagatcccatgggctggagatgtaaatgtgtattgtactcaacttgaccatctagatgagaactggcgtatgaagcagatcgatgcaattactcgaggagacgaatctccccacatcctccttggaggcttgaattctcttgatggctctgattattccatagcaagatggaaccacatcgtaaaggtacaatttcgttagatcagtcattatttagttggtctcatatataaccaaaaaccatgtattgtaagaacagtattacgaggattctggaaagccgacgcctagagttgaagtgatgaggtttccaagggaaaaggatacttggattcaaaagaatttgcaggagaatgtgagcatgtagtcattattgccaaag

SEQ ID NO: 26020 - DNA, 487 bp, Arabidopsis thaliana columbia
gaggatggccaaagaacaactcctgttggctgaccaggttcacacattttccttgtcgtgatcctcacggtgtccttagttgtctcagacaaagcggtccaagactgtccatatgcagtgcttatatgcacacagtttgctttcactagtctctgtgataacctcattatgttcctccttgcttctgcagatgaaattactgctgagagaaacagagatttaaacagtttaaggttgtaataagaatttatggatgatttagactactaacctccaagatcagttatgtttctagccattagactagcgatcctcgtcgcattgtctctgcaacacgtcgagccaatggttagctccaatagccgatccgcttttcacatactcagcaaaagtctcgtgcacatgtgtctcgtctacttcaacatgctccacccactgtgacttgtgagtatccattaggcctgtcctgaatgatgcagcctgaagg

SEQ ID NO: 26021 - DNA, 581 bp, Arabidopsis thaliana columbia
cactttatttttcttttggaactattaccacaaatgaaatgcgtaatctttgcattcaatgtgtattcattcaataataatctcatttttcaactattcgacgattttgtctaccaagttcaatgttagccaaattagtcccgcaatcaaacatttataaaatgctgaaaaaccagcattttcaaatttaagatcggtcattgccgaattgggaagctcaactggcagcaactaaacaaacttgatttaatagtcctcgcccgcgccagcaaaacgaacaatttcttgcgtcttgaacagcagatatccacggagctgaccataatgtcgcatcttttccgtatactatttagacgatcatcctatgaaagtctgagatacaatccacctaagcaaagtgctctactaagcagaatggatgaaggctttggggtgcgcacaaaaaatacatttacctaaaaatacattaacctgtacaagtttttattttgttttttgcaaaacatttcctaagattaatattttttattaaatttcatttattatatacgaaactgaaataacatcagattctttttggg

SEQ ID NO: 26022 - DNA, 1139 bp, Arabidopsis thaliana columbia
catggatttggcggaggagtgttttcttggagacatgtgatgagttctcttgcccatcaacttggctgtgttgtcactgcatttgataggcctggttggggattaaccgccagacctcataaaaaggatttggaagaaagagagatgccaaacccttacactctggataatcaggtgaagttctgttcaattccggactatgtttattacttatgagagctttttgtctttgctcttagaaagaaatgttaaaactcaaggatctgttgatgctttcaggtagacatgcttcttgccttttgccacgaaatgggatttgcttctgtagtcttggttggccatgatgatggaggtttgcttgctctcaaggctgcacaaagattgctagaaacaaaagatcccatcaaagtcaaaggagtggttttgcttaatgtaagcttgacgagggaagtagtgccagcttttgcaagaatacttctgcacacatcactaggaaagaaacaccttgttcgtccgcttttacgcactgaaatagctcaggtggtgaatcgcagagcttggtatgatcctgccaagatgacaaccgatgtcttaaggctatacaaggcaccacttcatgtggaaggctgggatgaggcacttcacgagataggcagactctcatccgagatggtgcttccaactcaaaatgcattgtcacttctcaaggcagtggaaaacttaccagtattagtcgttgctggagccgaagacgcacttgttcccctcaagtcctcccaagtcatggcttcaaaactcgaaaactctgtaagtcctccctctctatatctaattaaacacctaaactctgttgatacgtaactaacattatacatgtcaacaaacagaggctagtagcaatctcaggatgcggacatctgccacatgaggagtgtcccaaggcacttcttgcagccatgtgcccattcataagcagacttgtatttagtgaggactgagtgactgagtgatcactgtacttagtgaggagtgagtgactgagtgatcacttctagttgtcttcttagctcacaatcgattagtgtttgcgagttttttttgtctgccccaaaaggaaagaagttggggtgattgaggtc

SEQ ID NO: 26023 - DNA, 615 bp, Arabidopsis thaliana columbia
catttcaaacaacagcatggttgtagtcatggtaatggaatgtcttgtagatgaagtgtgatagccactttgaagctgcaaaacttaaaacagccgccacaagcactgcaattctagccacattcgacattgtcgtttgcttcaacaccgccatgactccgatcagagcaacggatgcgatttgtaagatcacctctagcgcattgagatatttgtgagctttcttgcagctgctgcagttctcaacatgcgaccaatacctggaacacgcaacttttatcattaggatgtttagcactacttttcattaaacctcacaagcgagataaataacctgtcgaagagctgttctcggggaggcgtaggaggaagaagaaatggatcaaactttcctctccaatcgactcgagcctcgctgtacttgttaaaccatctcctgaatgtaaccacattagcgtctgattttgttgggataaagcaagctttttgccagttttcagggcctctctccagtatctccgctcctacacacattccagtacaagatacaaatcagtctggtacattgatcacctctactcagaccaatgtgtgtctagatagatttggaattac

SEQ ID NO: 26024 - DNA, 528 bp, Arabidopsis thaliana columbia
ctcctgtaacatacatttttcatgaggagactcccagatggagtcagcttctgagtaacctcggcctttgatgctgcttctcagacatactttggtttagtcagatgcattcgttggaggaactcttttggtcaaacactacaatgtctttcttttttgggttttatctttgtggatcgtttagtagataaaacagaggttgtctcttttaagccttttaagtccatctagtccatttcagtttttcaggagtcaacacttttaaaaaccaattttatcaaagcattcgtagaaggaggtcaaaacattccaaatgacatactcgaaattgatccgcccgtacatcactatttccagttcattggattcagtaactcaggagtgatggtgtaacacataagaactcagtatcgctatctattcagctaatcagcttctgaacaaaaaccaatattggtgactcctcgcccattgttgcggtaatgaagtacattcacgttttcatggaaactcatatctgacacgggc

SEQ ID NO: 26025 - DNA, 818 bp, Arabidopsis thaliana
ttgccgccgtttgaccaatggacgcgaggatagggccggcgaaaatgtaaaggagagagaggataagagcagtcacgtttagtatcgcccatgatcgttgcaagtaaacgccaagcattgacaattttcctgctccaaacgcttgtccacatagcgtttctaacgcacttcccattccaagctagttgcggacgttcataatcacattcattacaatgatcaaaacaaaacttcttaaatcttacaaaaaaaaataaagtgaaacttttacaaaaggcaaaaaatatattaatttttaaacttgagaaaatggtccatttgataaataaattgtactttgactagtgactacaaattgataatcatgaattcatttcttcaatttttttgggcgtttgaatttacatttttaatgtatatatgttaaattattttttttaatttaatggtcttttgatataaattaaaatatagaaaattgtttatagaaatgtagacaaaaacattttgaatgatttggacatctcccaacttttggatctttgtgtgttttaagttaataatgaaacttagtcaaagaaagaaaaaaaacgcattttggataataaatgcaaaccacaaaataaaaggcgtggatataatttaccatgatgccgaatgagaagccggcaacgacggagttttcgacggagacagcggcaagagcgatggtgctgatgtgaccggcgaagacctgagtaatagcgccgagagaatattggttcacggatgtaaaatggcgggaccgccaagtccatagctttttggtttcacgttga

SEQ ID NO: 26026 - DNA, 900 bp, Arabidopsis thaliana
gtgcaaccgctgatatcgcagccatcaccatgattttgctttgtgattgcaagaacttagccgttgggtaattaacagcgtaacgaaagatctgagggatcatgtagatggaaaatattcccgtggcgctagagatcgccggcgtttgaccgatgaacgcgaggattggagcggcgaagatgtaaagaagcgagagaataaccgcggtcacgtttagtatcacccatgatcgttgcaagtaaacgccaagcattgacaatttccctgctccaaacgcttgtccacatagcgtttctaacgcgcttcccattccaagctaattaatggtcacattcacaattattattacaactcaaaaaaaaaaagtttcttagaatatcttacttataaatatggtttatatggtaataaaaactattataatcttactacaaattgaaaaatcgcacaagatttcgttctttttttttggcgtttgtgcttacattttttttgtttgtgttatacatttactatcatatttatttttgatcttttaaatatctttttttgcaacattttgatttatattattgaaaatgatattttagaactagctcaaaacattttgaatggtttaaaaaaaaaaaacattttgaatgatttagaggtatatctcccaaactaatagtattaaattcagcacatttgaatgataaacgcaaaccaaaaaggtcaacaaggggatattaatttaccatgacaccaaatgagaatccagcgatgaccgagttttcaacggagaccgctgcgagacggatggtgctgatgtgtccggcgaagacctgagtagcagcgccgagagaatattgggttatagacatgaaaatggctggccctgccaagtaccatagctttttg

SEQ ID NO: 26027 - DNA, 437 bp, Arabidopsis thaliana columbia
attattatgacaaaggccttagttaaacctacaccgaccgtggctagtaagagcttgtctatcgaaacaactccggctttcttgaaaattctcgggctgtacaacacgacggcctcaatccccgtcgcatgctcgaaaaagtgtatcccaacggccgctatcaagatcaaacgcaccgcaggtcgcggtcattatcaccaactccctccaaacacttttaccgtgattcttcttcttaacgccgccaccaacttcttttatctctgtcacatctacttccgcagcggttaagatgtctctgagacgtacttcagcttcttcttccgtattggataccacaaccattatgctcttggcttcttctaacctaccttgcatcgcaagccacctcggcgactcgggcattcttgtaatcccaagagccaatatcaaagacg

SEQ ID NO: 26028 - DNA, 506 bp, Arabidopsis thaliana columbia
tgactcagaggtctttcgacttaatggagtcgctacttcggtgagcttatacgcgttttgttattgcgctcatccagttttcccaactctatacacttccatgaagaacaaacgccaattctcaaacgtaagttttttacataacggatcattaggttattcttgaccaaaactcacactaataattttgcatattttttttaacattttcaggttatgattatatgtttcacaatatgcaccttcatatatgcatcagtggcggtattgggttacttaatgtatggatcagatgttgaatcacagatcactttgaatcttcctactgataagcttagttcaaaagtggcgatatggactacattggtcaacccaatagctaagtttgctctcatggttacacctattattgacgcaatgagaagccggttttctcgagttttgcctaataaaagagcttctggatttttgctaagtacaatactagttactagcaatgtgattgt

SEQ ID NO: 26029 - DNA, 485 bp, Arabidopsis thaliana columbia
cactccatatcaagtagcatgtcggattcatcaaatagctcaggagcagttttgctgggaagttcatctgcttccttggaacaaaactggaaccaaataagaactcataacaatagcggtgaaagcggatcaagttcaacactaaccgtaaaagccacttacagagaggacactgtacgtttcaagcttgatccatacgttgttgggtgttctcagctctacagagaagtggctaagcgtttcaagctgcaagaaggtgcctttcagttgaaatacttggatgatgaagaagaatgggtgatgttggtcacagattctgatctccatgaatgcttcgagatattaaatggtatgagaaaacatacagtgaagtttctggtccgtgatataccgaacaccgcaatgggaagttccgcatgcagcaatggttacctcggaacaggcacctaagcatcaatgtgatggtgcttaaatatgtacagata

SEQ ID NO: 26030 - DNA, 485 bp, Arabidopsis thaliana columbia
cagccaccacctccggttgttcctaaccatggtcaacaaacttgtcctttgcttagtgattttggatgtaatgtaccggcaccggaaacacatcccgcgaataggtttttagcggattggttcgctgttcgcggcggagattgtcccggagatgggttgagattgtgttcacacgctggttgtggacgaccggagacgaggaagcatgagtttaggagatgttcggtttgtggcgttgttaattattgttcacgcgcttgtcaagctttagattggaaactccggcataaaatggattgtgctccggtgcaacggtggctagaggaaggtgacggtggtgaaggtaacgttcagattgacggaaatggtaacggtgataatgttttgcttccaatgagttaacggcaatgttaacggctcttttgattagtaaaaaaaaccgcgagagatgaggtaaacggaagctaggttcggttttttttttt

SEQ ID NO: 26031 - DNA, 912 bp, Arabidopsis thaliana
aagtttaattaaagtttatagtgctatttttgaaattttagaaatgttgtgttaattttggaagaaaaactttttttggtgctatttttgtcaattgccctaatttatatgtgtataattctaattacttctatggatcgcctttgttatgtgctcatgaaattgcaagtcaggtggtcttaaattctaatccttgatgaagtatgaataagatggcccaaaaaattttaaccatgcattattgaaagcagttgaaaattaggcactcataggtgatgattgtaatttaaaagcatagatgaaacaaaaaccagatgaaaaaaaaaagcgactccacatagaactaaaaggaataacgaaaccaagttatgaatgaatcaagtcccagggagaaaccatcgagcatccttgagaatcaagttgtctagtcgagggaagcaagtgttgtttgacggtcttggttgcaacattgaacacacaaatgtccagatccaaagggacccggagacgggaacggtcatgatgggtgaaatagatagagtttggttggaaaccaatggtatggttagcagacacggtagtacccaagtcgacaagcagggcctcatcactaagagaatctaactcaccaagatagggcccaaaataattatgattatgaaccttcttgaagaggcagaagctcctatggttatttgcagaactttgtttttagtttaacagatagtgattaacaaataactaaaagaacgatcattttattggaagtattaataatataaattaccgttacatgaaaaacaatatctaaggattgaaaaaatgtgattaaaaaatgcctaacctgaaactcaaaccagaaaccattcagtttatatataagtttgtacatttgaagatttttagaattat

SEQ ID NO: 26032 - DNA, 501 bp, Arabidopsis thaliana columbia
ccttttgagacgtttcaaagttccaggactaacttgtctctccttctctgctttggacaacttcttcttcatgaaatcatttccccacatgagtctatccattgtgagatccccacaccataagatccctttaatcaattgaccagaaccagcagcgatcagtttcgctgcaacgccactgtaatcctcaacattcggagccagagtcgtccaataagccgtacactgcttctccaccatctttttcctctttcccttcagctcctccggtgaagtctccttcgccgccgtcaaatccaaaacgttctcttctttctgtttctcctccgctgtgaaactactgtaatcagctaagatcttgtctagcttctcaagcatcggttcttgacctttcgaagccattgttaatccgtagttcaacatctcgttctctgtttcgttgactgaatgatccgatgactcggattctttaacgggtcggagcgagaagaagtaatgaga

SEQ ID NO: 26033 - DNA, 515 bp, Arabidopsis thaliana columbia
  unsure (1)..(515): unsure at all n locations
nnnnnnnnnnnnnnnnnnnnnttctcagtttactaacataagcgtaaatcccactatattgtgtttacgcttatgttagtagactcagaaaacagtttttttttttcatggttgttacttgttatagaaattataagtttgcatacttaagagccagtgttgctgccagctgtttgtcctttagccgcacgaatactgccaacctgttgctctggcctccatatccctgagatcgtcctgatgttgaaggattttcttctctacttttgattaggagctgaagtaaccaatcagaagccccattccgcaagaagcggtccgaaagtgctaaagcatccattagttttccttcatcaattagtctagcaaaattccaacaaacgaacacttaaattaatctcaagacaacaaaatccaatctggaagacttttcacaagctaacaaacaaatagaagatgcagacatatgagataaactgccatacctaattacagctttctcatacggtacttca

SEQ ID NO: 26034 - DNA, 658 bp, Arabidopsis thaliana
tgatgacctcactattcgactcgagaacatggaggaggcgcttgttgagattaacaatactctccttaaccactaagatgatatccaagaccaaaacactagaatcgtcaatgtggagtttaccgtcgataccgttgagagccgtctaggaatgattcccaagaagaagatgattccgaagggagctagagaagaagggagctagagaagaagctcactgactcaaatgagctataggaatgattcccaagaagaagatgattccgaaggttcaagcctgatatgaggaggaaacgaaaaaggaaaccgaattcctcgtggaaaaaggaaaaaccctaatttcctttttcgaaaagggaaatcccgacccttagggattttgaccccttttgtttctcctcaagacaaaatcgagcaagaagaggacttagaagaagaagaagccgccccttttgaaggagactctatggatgaatacaaccctagcgaagaaggttctgaaaccgaaagaaaagaaggttgccttgtgagtcaagaaaaccaaatcgaaaaactttcggatgaagatgacgaactcgccaacatctctagcgaagaggaataagaaggagaactcaaggaacccactcttgcatggctacctgcatgcttagtgggg

SEQ ID NO: 26035 - DNA, 807 bp, Arabidopsis thaliana
aacgtgtgactgcatcaaacagagtgtattatgagcacaagatgtatacactccatgagatctacccacacaaatcccccaaaaaaagaataactcttttagcatgattagaattatgctttaccagcaaaggttatataataaagtgtgcgctttgctcataacacttttctgagcttgcaacaatgtggtttcataaatggcctaataaatcttaggaaacaaaaaaaaaacacacacacaataacggtttcaattctcaatgatccagaaaaaacgagtagtcttgttgtacctggattagccagaatcaagacaagatcaatgtcagggttactggctgcaacatccagagcaagagaagctccaatagattctccaactatataaatgggtctatttgggaaacggtagtgctctgacctaactgtcttctcaatgagcttcccaatatctgaaaacaacagtaagattttcaccaacataagattacaaaacgctaatgcgacttcagataatgcttaagaagcacctcgagcaggagtacgatcttttactggaaagtgaaggcaccatatgtcaaatatcctatgatcaataaagataatgagatcatcaacaaagagtacatcactagatctctacttctctttctaaagtaacaggagctgtgcacaatgaagagcctatctcaagctcgaaggcaataaataagattgaatcaaacaagacttactctccaagcctcttatgctggcgaatgaccctaatccagttccatcgatccctgaaattttgaaaactagt

SEQ ID NO: 26036 - DNA, 592 bp, Arabidopsis thaliana columbia
tgctcctcttcgatcctcttgaacctctcttcgttcgccatagcttctttcatgcgcgaaccttcagattttttgaagtttacaaagagggcatcgactttactaaaaagagtaaccttgatatcgtcgatccttgagttgagcgtccttgcatccaaagcttgttgatctacgaattggctcatcaagatctcaagtctctcttcttgagtcttgtacttccaaggcatgtgagaatggtcttgggttggtagcaagggcaaaacgggcggtaggtggtgttgggccgaatagcttctttcggctcctcttggataggaagtccgaaaacgacttggttggcctcttctggttgcatcaaggtccttaccggcttgaataggatccaaacttctcctaggtttagcttcttctatggacatgagttgcccgaagctagggtttgcggatatccccccgctaggtagtcggattgtcatgcaagagtggacatccttgagctcttcgtcttctctttcttcactagagatgttggtgagttcgtcatcttcttctgaaagttcttcgatttggttttcttgactcacaaggt

SEQ ID NO: 26037 - DNA, 528 bp, Arabidopsis thaliana
cacaaagaagattcttttccgtttctagtagccaatgcagcttcgagatcccttgagaacagtgttgtctgggacagtgtttattttctccgaatcacagagtgtggctatgagtatgagcagacttacgccttcttgcctctgcttcctttcttcatctcgcttctctctcgcacaggttttgtaatttagacatctacccacttgattccttactttggttgtatcattccggtagtaactgattctttttggattcagtttttgcgcctttggttccattgattggtcttcgagctgtgatggtgttgtctggtttcactgttagtaacttggcgttcatatttgctgctatctatctatttaggtacttctttgacattcatcctaaatcgattattgtgtctagaaataagtcaagtcaagagtcttttgagctctacaagctaatgctgtttgctattcaccgtgtcttacaccagtcgttgctaacagggtttcagttattatcttgaaggatactgaagc

SEQ ID NO: 26038 - DNA, 594 bp, Arabidopsis thaliana
atgcttgaactcgtgctaccaatagagttatgttgactatacttaaaatctttgctcaaactcatgacttggtcctttgtcacacttacattgatgttaacatttgattcttcattctccatttgttgtaagctgactagagaagtgtattgaccatctacattctccatgagctcttcgtgtgatccagtttctacaatctgaccattatggattacacatataacatcaacattacgaatggtagagaggcggtgggcaataacaatagttgtacgaccaatagtggcattgtctaaggattcttggactactctttcggattctgaatctaatgcgcttgttgcctcgtctagaaggagaatttttggtgatttgattatcgcacgtgcaattgcgatcctttgcttctgaccccctgacatttgcactcctctctccccaacctttttttgtaaataagaaaaactaaatatccattttgagaaagttaaacaataatcaaattttctaaagttggaatctaacctgagttttgtaaccaagagggaactgagaaatgaaatcatgagcatttgaggactttgcagcttc

SEQ ID NO: 26039 - DNA, 1179 bp, Arabidopsis thaliana
caagagtctgttcaaaattatgatgacacatgcaaacaggtcgatcttatcacagagaagctgaatatgcaagagaatcttgaaactcagtctctaagtgcgataagacttggggtcgaaggtagttcggtgaaaaccgataacacgcagtacagtgaagatgaagatttggagaatcaatacagtatcccggagcttgcagctctcggattttattatgatccaaccttaactgcttcaaatctaaaggttgtgatagtctagctctacaacgttccgtatgcctcaacttatcttcgctgtctccatactttttatcttagacttcatattctaagaaagaaagcagtaatcatattcattgatggaataaagatgcattgtaatttaagtcgttaagttatatgaactttttatgaaaatggaaaaggtcacaaggccatattttcagtgactagataaatgaaaagtgcatgcttttcaaatgatatggacgttttggtatttacctcaataattcgtatgctacattttcatataaaccaagagaacctcgagattagaaagtgaacacattccaattagtcaataattcagcaaatagtagaagaaagtagaattgattcatttgagaaaaggactggcactatttgatatatacagtatgctgataatatatattaccattatgcaataatataaaccttatcacaacaaatctttatccgaaccaccaccaatggaagatgttcaaaactcagacaagaacctttgaaagtcacgtgtgcggatcagatgactcagatccaaatatctgacgtcacagaacctgcgagctccgcacatgtaaactcctgccggagttcatctaacgacacgcggcaatatgtgtgtgggttaacaaatgtggattttgtggggtccgctacctatctgttatacactcggatggacagtccagttactatgtgggccttgaggctatgttaatccggcccatttagcttaaccccaatttaatttctatattttcaaaggtagaaaaaaattgaagtgacacagcgaagttcgagtatgagccgcaagagagataaaccctacacaaaccgtcacacaccggcgcgaatttcgaaacgccggcgaccatgggcgcattcgtcatcggagcacgatgagatt

SEQ ID NO: 26040 - DNA, 594 bp, Arabidopsis thaliana columbia
gattctcgttcttagtttgctttactttttcaatgtaaaagactcaatgattcataaagaagcaaacttttcataaaaagatgagaactttggagatgtttttaacaacaaaagagtcgtagcatcaaagcttttcaaaaaacaaattaaaattacagtgagagacaacaagtgaagaatctcatatttctaattagagaagagagactcgtcgatatcgattttcatcttctcgtcgttctcaaacttatctctcctcggtggtgctggaggaaccggtactctctccggtcctcttcctttgctcttgtatctaggcctcgcctgcatacataaaccccaaattcaaaaccaaaattgcgaatatgcaaagtaaaattacgaaatcggaaagagaaatttgattacttacattcccaaaagagtgattgaaacgctttcatttagctgtattccggtcacctctggcacagtacactgcgaacaccggaaaagttacgccattgacgaattaagagagagttagataagagagggagattactgagtggaattgagctggatgaggaagtggagagagagaattgatgagtg

SEQ ID NO: 26041 - DNA, 559 bp, Arabidopsis thaliana columbia
cagaataaatatctttttattttaataaatttatattttctggtaaataaaataaatattttttgagaaatttttttattattattttgagaaattattattattagttctggtatgaatgatgattgaagtggtagtagcagtgaaaaacaaaagcaatccaatcccaaacccatttgctcttaagattcttcacatagagaagtcacatgttccttcttcttcttccttcatcatccccaaacacacacaaactaaaaaaaaggcaaaaccctagatccaagatcagacctaatctaatcgaaactcatagctgaaaaatgaagagagatcatcaccaattccaaggtcgattgtccaaccacgggacttcttcttcatcatcatcaatctctaaagataagatgatgatggtgaaaaaagaagaagacggtggaggtaacatggacgacgagcttctcgctgttttaggttacaaagttaggtcatcggagatggcggaggttgctttgaaactcgaacaattagagacgatgatgagtaatgttccagaagatgg

SEQ ID NO: 26042 - DNA, 324 bp, Arabidopsis thaliana columbia
aaccgacctctcagcaacccaacttcactctctattttcagtctttcatagtcaatagctgacattgaatttcttcgcatattggtagacatgttacttttcccttgtggaaatgcataacttgtatctgaaacactttgtgatctgtccagtttcagatcctgagtggcatggtcagaaggaacattcagttgccccttgttatcttcatcagtcactacatggatgtcatgtacatgacaatcaatgtcgtgagggtcctcacaaagcttcttagaaacagcaatgtcgctagttcttgatactagttctgcatataaagtt

SEQ ID NO: 26043 - DNA, 607 bp, Arabidopsis thaliana columbia
  unsure (1)..(607): unsure at all n locations
nnnnnnnnnnctaaagcaataccggtctggtgattgacccgtacttttctggcaccaaagtgaagtggatcctcgaccatgtggaaggctctcgcgagcgtgcacgtcgtggtgaattgctgtttggtacggttgatacgtggcttatctggaaaatgactcagggccgtgtccatgtgaccgattacaccaacgcctctcgtaccatgttgttcaacatccataccctggactgggacgacaaaatgctggaagtgctggatattccgcgcgagatgctgccagaagtgcgtcgttcttccgaagtatacggtcagactaacattggcggcaaaggcggcacgcgtattccaatctccgggatcgccggtgaccagcaggccgcgctgtttggtcagttgtgcgtgaaagaagggatggcgaagaacacctatggcactggctgctttatgctgatgaacactggcgagaaagcggtgaaatcagaaaacggcctgctgaccaccatcgcctgcggctcgactggcgaagtgaactatgcgttggaaggtgcggtgtttatggcaggcgcatccattcagtggctgcgcgatgaaatgaagttgat

SEQ ID NO: 26044 - DNA, 503 bp, Arabidopsis thaliana columbia
ttgagattagaaaagagaaaataatataaaaacttttatttttaccttcaagagtagagcattgcaagactgtttcttaatagcttcagctatcctcttcgggttagtgactaacaagtcatctcccacgagttggatatccacagaggattgcaatgaagcccatgagctccaatcatcctggtcaaaaggatcttcgatagagacaattgggaaatccttgatgaattctctgtagaggtcagcaagactctcggctgacagtacgtgagctccatcgtttggctgtttcttgaagttcaaatcgtatctaccatctttcatgaaaaattctgatgcagcaacatccattcctattttgatctgcaaaaattatatattatgtgagtggtgtaagattgacaccgaagctgccagaagttgtttagggaaacacagatgacatgcaactttagcaagtattagcattagaaagaaagagaacttgattacctttccagtgt

SEQ ID NO: 26045 - DNA, 501 bp, Arabidopsis thaliana columbia
atctctgatttgttgaggctataaagccctggatctattattattggtttccctcttttgttcctacacattttagtattttactattatcagttgcataattttgtttcccttacaaaaccaataagactaaccacttctttttcagatagtttaaatatttctaagcatgtttcactaattctgtctttatcctttgatagtatagattatagaaataagatgaccaaataattagacaagagaaagataaaacaaagagagtaaaacttacattttccatcctaatcggctcgtgtgctgtatgaagttgagatctctaggcaactcagaaaatgcatagatcagatctgcatttatttaatattataaagattaaatataacaagagtcattcatcagcatatccataagtaaaagcacacaccattatcagacaaagaattaatagataaccggttgtaatcccaaaatcatcgatcccaacaagtacattcatgt

SEQ ID NO: 26046 - DNA, 586 bp, Arabidopsis thaliana columbia
tgaaattctaactcatataattttttaaaataatatttactgaaacaagatttacatataaaaaaaaatcagtgacgtgaatatgatatgaacaccataataattcatagatttcgatcatattttcccaactcataaaaatctattaggtatatctaaagaaaaagaaaatactgtttgcggcaaatgcatgaagtacggcgcaaaagagcattggtgcctttctgtacatatgcatgcatggggatttacaatatgaacctacttcctcacttcccgtaattacttctctattccatactcacttcgtcacttgtattaaagcttaaccttggtgcaatctcaattacacttttaaactctatgttgatctcaacaatgaagcagaaacatctactgcttctaggattcttattagcttattgcttcagctctgtttttgtgataaacgcagaggacccctaccttttcttcacttggactgttacttatggaaccagatcgcctttaggtgttcccaacaggttatacattgttctgctatttttgtatgcattttcttaatttttagtattttcttctttat

SEQ ID NO: 26047 - DNA, 497 bp, Arabidopsis thaliana columbia
ttcccctctcaagcagattaacctatctcccggcgtcacagttaccgaaacagaggagcaagatcagtgtcctacgacccctacggcggtttccgtcagaattccaagggtcccgccgtgtccagcggcgccaaagaagcgtaaaccgtcgttgaagtgcagttacgtcaccgtcactagagattacttctctccgccggacctagaaaccgttttcattcaaagagctagttattaactctgttttcacgactctgatccctctctctctctttataaccttcttttagggttagttttcttcatctagtcgtaatcctcgaatctggtttagtactcttcagtcttagattctgaacttaactaaatttactctatttgtttctcagttgtattaacgttaggacactaatcaaggttagtgaatatgaagtgtttgtttcatgtttatgtatatttctattcccccgtgttttgagtataattgatgtatatga

SEQ ID NO: 26048 - DNA, 927 bp, Arabidopsis thaliana
ctgttggtagaagttcgagcaacgggcctactcgaagacaatcccttggtggagctgaaacaagtccaaaaattacatcaaatggctcgctgattaagagaacaccaagttctcagttgagatcattgactgctagtgcaagcactgtattgaagcatgcgaaaggaacatcaagatcatttgatgggggcaccagatcattggatagaagcaaagtgctaataaatggaccgagatcgaattttcctttgaaccacaagtcttctgaaggaactagcagaggcgaatcgcctagctcaataaaaggggaagaagaatcagctgacaaggcaacaaataatgatagcgtcccaggtgtcttgtacgatctgctgcagaaagaggtcataacattaagaaaagcggcgcatgaaaaagatcagagcctgagagacaaggacgaagcgattgaggtttgctagtgtttggccttttttcctgttctttgccgcctttatatgaaatgttgtataatataagtctaaagatatgggttgtgtatatttagatgttggccaagaaggttgaaacattaacaaaggcgatggacgttgaggcaaagaagatgcgaagagaagtagctgtaatggggaaagaagttgctgcaatgcgtgttgttgataaaggacaacaagatagtaagaccagacgtctctcggtctcaaagggaaacacagctcagctactttctggaaggtattaatgtattatcatatcaactacaataagctttattattacctttagatgtcattattgtttatgtattttatcatttggtagagtgtctggacgaatcgggatgacgaggagcacacagtgacaaactgattcgatcaacactggttggtcctgtgcttgcttaaggtcttgtacaaatgagagaag

SEQ ID NO: 26049 - DNA, 570 bp, Arabidopsis thaliana columbia
gatttgattatgatgctaagaatcagataatggattgataagaaacttgttgtgtttccaaatttggtagctttttaggttttgattgtaagatcaattttggttgatcattttagggctctcattttttctgcaggcaaggcaagttcatccagacaagaaccctggtgatcctcaagctgctaaaaactttcaggtgattttttcctttcaccttaaaatatagaatcatctctattgctatgtttattagtttgcttaacgactttcacaagggttttcaaggagtgtttgattggatgatattctggatcactctaacctataaattggtgttgtgtgaatgaagatactaggtgaagcttatcaagttctaggcgatccggagaagcgtacagcttatgacaaatatggaaaagaaggggttcacagtaagtttcacactttcattcctcatgattcattctacatttgaagattttcggtttccccacataagaagcctagagataacttctgtgatgtatatatgtcatttgagaatgtgattggtataatgctatagtatgt

SEQ ID NO: 26050 - DNA, 600 bp, Arabidopsis thaliana columbia
ctgttttaccattcaaggaaaaaggataaatcttgtagaaagaagatgccaaaatgatttttttatttagaaattaaacagcgacgtcgttttgcagctacagtgcgatcatctaatcagtcagtgtcttcaagtttaaaccgcatctctagtctctctctacttctctctgtgtacaatattcggaaagtgaggaagatacactgaagcaaaagagcaagtcatggcggcgacatcttcctctgcttttctccttaatccgttgacttctcgccaccgtcctttcaaatactcgccagagctctcttctctctccttatcctctcgaaaggctgctgctttcgatgtttcctcagctgctttcacgctcaagagacagagccggagtgatgttgtgtgcaaggctgtatctatcaagccagaagctggtgttgaagggctcaatatcgccgataacgccgctcaggttagattgtgtttcgtttgcatttggatagagacagaggaaatctaaattggtgatcaattttgtcaatttaggggaagatataactaactgagtattattagtcttgtaaatttgacttctttgaattttga

SEQ ID NO: 26051 - DNA, 198 bp, Arabidopsis thaliana columbia
ctaaagaggtacaggtaaagatctctttgcctacgcctgccatctaggaagccccagagcgggcaaaccttacctggcgctgaactgtgcgtctataccggaagatgcggtcgagagtgaactgtttggtcatactccggaagggaagaaaggattctttgagcaggcgaacggtggttcggtgctgttggatgaaat

SEQ ID NO: 26052 - DNA, 481 bp, Arabidopsis thaliana columbia
cgttcataatgcgaattcgaaggatcagtttttgagcattatcatcattgaatatgcaagttaggtcatcatcgaactcaaggttgatcttctccgcaatatccgccatactcaatttcttatcaaccatcatctcgcgattcaactctatacgaagtagccacggagatatcttatctggggacacatcttcatctggcatttcatagtaggacctcacaaattcaaagtcctcttcaattatcgtactcattggatctgggtcataccagacttccgtagcttgagtaacactcctgagagtagtatactccaaagcacactgaacagtcttagccccctcttttgatttgctagcttccggagtgagatagactgatagggatggtgttttgcatctcttagctacattaataatttcacgcaacctgggaactccgagcgtaacgttctttgcactgacaccagcataatggaaggt

SEQ ID NO: 26053 - DNA, 373 bp, Arabidopsis thaliana columbia
gccagtgtgctctaaaggctttcttcaacgtcttttttgcaaaggtggtaagcacattttattttcttagtcatcaccatgactccgcctttacaggtaaaccatcacgaccgaggaagactttaatcatgcggtcagtaatgaatgtttttgtggtcaggttacgaatatatagttttcgctttttaatattgtttgccgaggcaatatatgtccggccttcatgaagaacataatcgccaggagtcacacactgacgtggtatttcatcagttccgaagtgatgtgcaatcataattatctccatttttacaaatgaactctgttgatgcggtgtctagtgcctccaggtgactgcaaccagttaacaatt

SEQ ID NO: 26054 - DNA, 1092 bp, Arabidopsis thaliana
agattagacttttatcataccaggacagtggtgagcatcgatggccatgagatggaggcggactgtggagccggagaaggagagcggagggagagagatgtccaggaaaagagagggacgacgcgaacaacggagaggtcgaaacctgggaaacgggagggaaatagagaggcggtggtgcgggaacagtagagaggaccttgggaccattccgcggaagaaggccacgagtgtgatcggagtgtatatgagtcaagaagtaggcttgacttccatttctccatcgatccactgatatcagaccactctccatttcggattccttgaaaattgaaattgcaggtgttttgcagtttcaccatttttgtttgcccacttagtgacgatgattccttccgtcttttgggccgtttatgatgatttatgattgggtctgttttgggttttacaaacgaatgaaagtgttacttgctcttacgtaacataacatttcgaactttctcgagttcaaaactaatccatccgttttatcagactgtgtagtcgatgtattggtcattatattaatgagcgttatgaacaaactgggcgacgatttatgaagtcttaactaatccatctctaaaacatatttcaagattttactatgagttattcatctatcaataccaaggataaagagagattctttcagcaatccaaaaaccgataatcatcatacttaaaaattgagtattggtcttatagagagaagctaacaaaaagtattaagggtaacacaagtgagcacaaatagactgtctatgttatagcttaagatgaggctcctttctttgactttgctgccaactgtgtctccggctgtgcaagaacccaacaaaaattatgtgagatcagtgatgaagatgaaatataagtatttgaagatattcagagaggcgttgggatcattaaattacctctttcttcacaggctcttctttctctgacaaaatcaactcaatgtggcatgggtttgacatgtaagctgcataagatagaattaaatcgagagtcagcacaatgtgaatgaagaaacaacgttgtaaaaca

SEQ ID NO: 26055 - DNA, 564 bp, Arabidopsis thaliana columbia
  unsure (1)..(564): unsure at all n locations
cgccagtgtgctctaaagtgccgtcattactctcaaacagggggtagggcgactgattcgcgacgccgacgatcgtggcgtgctggtgatttgtgacaatcggctggtgatgcgtccttacggcgcgacgtttctcgccagtctgccgcccgcgccacgcacccgtgacattgcccgtgcggttcgtttccttgcgataccatcctccaggtaatttgttacggagtatggtatgatgcgcgcctttttattgatctaagcacgaagacccatgcgaattctggctatcgataccgcgacagaggcctgctctgtcgccctgtggaacgacggtactgtcaacgctcattttgagctttgccctcgtgaacatactcaacgaatcttaccgatggtgcaggatatcctgaccaccagcggaacttccctgactgatattaacgctctggcttacgggcgcggccccggtagctttactggcgtgcgcattggtattggcatccgcaagggctggcgcttggcggganattaccgatgattggcgtctcacgctaatgacgatgg

SEQ ID NO: 26056 - DNA, 361 bp, Arabidopsis thaliana columbia
actctcagtgtgctctaaaggagggtatgacaatgaaaaaagtattagctctggttgttgccgctgctatgggtctgtcttctgccgcctttgctgcagagactacgaccacacctgctccgactgcgacgaccaccaaagcagcgccggcgaaaactagacatcataaagaacagcataaagcagcacctgcccagaaagcgcaggcggctaaaaagcatcataaaaatacgcaagctgaacagaaagcccctgaacaaaaagcgcaggcagcgaagaaacacgccaagaaacacagccgtcagcaaccggcaaaactctgctgcagaacccgcagcgtaagtttgcaacagtaatgctg

SEQ ID NO: 26057 - DNA, 594 bp, Arabidopsis thaliana
caggtcgactgatccccgttcatcggctgagctaatggagaactcggcgagtgagctcactgcaactgacattccatggcagagtactttaactgcaatctcagctagtttctctgcagtcattatcttctcttcttccactttctcagcttcaacaagctccatgctctctggtcttgagtacttcctcgaagaatctgttaccggagacgtgtcttcctttagttgccgagcatagattgcacccatccctgaggcaaagaagtcgagtttgtctagtactggcttctcgtttaatccgttgagtagccttgaccattggatgcagacttcataaattgggtgaggacaagacgttaatgtgactttctctgggtcagggtcacatctgaaacatctgagtaaccacccggttaaagagagtatgtaggatctttgtgatgtgatccatgcttggaagcaggctctccagtttcgaagctgaaccacaagatgcaatgctgatcgagctaatctttgagagttgatctctggtagtgaagtctgttgttgcttcttgtgacggttagaaggtgtggttgcaagtaatagttt

SEQ ID NO: 26058 - DNA, 917 bp, Arabidopsis thaliana
attgagtttttaatttttcaggcaaagttcaagaactgagcgtgtacgaaatcaatgatttagatcgacacagcccaaaaattcttaaaaacgcattcagctttaggtttggtctcggagatctcgtcccattcacaaacaaactctacaccggcgatctcaagaaacgcgtgggaatcacggctggtctctgcgttgtgatcgaacacgtccctgagaagaacggtgatagattcgaagctacgtacagcttctacttcggagactatggccacttgtccgtacaaggaccatacttgacttacgaggattcgttcctcgctgtcactggtggcgctggaatctttgaaggtgcctacggacaggtcaagcttcaacagcttgtgtatccgacaaaactgttctacactttttaccttaaagggttggctaatgatttgccgttggagctcaccggaacaccggtaccgccgtctaaggacatagagccggcgccggaagctaaggcactggagcctagcggagttataagtaactataccaactaattcatgaaattaaaatgtttctcgtatcgctgtgtaatgatataaagatttgtagttttgtgctcttatctgtaataaaatcattgaggaataatatctcgagtatgttttaagtcgtttggacgttggtacacgaatatatgaaaagtctttgtaatcttttggtcactctcaatgattttgaattaaaaatagttttagttatagaaatgattttatgtattgcacaagaaaatcaaataaaaagaactattaaataatgaaaatatatatcttaaataaaagagtataacaattgaattcttaaaaatcatacagtatctcaacaaatccaagaaacaacgaaacgaaaaattgatgtatcatttg

SEQ ID NO: 26059 - DNA, 587 bp, Arabidopsis thaliana columbia
tgtataattatccttttcagatactttgtcatacaacactgacatgcaacgttctaatgtcttgtcatgaaaaatgcagtgccctttgctattgaaagagttcattgttgaggcatggcagatatactatggtagaagtaaaggcgcagatgcagttttgttgatcgcttctgtgttacctgaccttgacatcaaatacatgattaagatttgcaaaatacttggaatggctacacttgtggaggtttgtaaccagtttcatatacgcctcaactaatgcttctgtctcttcctaatcctaattagtgtttttctgattttcttggttaccacttgcctctaggtccatgacgaaagggagatggatcgtgttcttgcaattgaaggagtcgagctcattggcatcaataaccgtaaccttggtaaatgcttgaaccagacctcctttaaagctagacatacaatccttcttgatccgttttatcacttttctttcagaaacatttgaggtagatcttggtatcacaaagaagctacttgagggagagcgtggcaactgatctgcaaaaagacatccttgtaagtag

SEQ ID NO: 26060 - DNA, 1118 bp, Arabidopsis thaliana
ttcttgatgaaggtgatgatgatgtggaggaagagcaggaacaggaaacagaggtacaggttcatccagagcctgaggtgaagaaagctcctgaagttcctgcacctcctaaagaggcagagaggcaactttccaagaaagagaggaaaaagaaggaacttgctgagcttgaagctttgttggctgattttggagttgcccccaaggagaacaatggcctagaggaatctcaaggtacacttgtcttcaatcaattttgacatctgtaataatacttatcacgtattggcacagccattgcaactgatattgcttagttccagacagttgtgctctttaatagtattaatgttttgtgtagtgtcactatcttgctgagaaaatcagcatgtttgatatgtctagcagttttgctaattccgatacattgcatgttctttttacagaggctggacaagaaaagaaagaagatgtcaatggagagggagagaagaaggagaatgcagcaggtggggagtcaaaggcatcaaaaaagaagaaaaagaaggataagcagaaggagtaaaagaatctcaagagcaacaagcaaacaacaatgccgatgctgtagatgaagctgctgggtctgaaccaactgaggaagaatctccaattgacgtcaaggaaaggataaagaagcttgcatccatgaagaagaagaagtcaggcaaagaggtggatgctgcagctaaagctgctgcggaggaggcagctgcaagacgtaagaagctggccgcggcaaagaagaaggagaagaatcactataaccaacagcctgtgcggtaaaatcctgaatcaccaccattttgatcttgatggaaatgcaaatatgaacatgtatttcgccgtatattgttcatatgagtctctgtcctaataaatcttttgaagggtctggttcttagagttaaagacattgaatcctttttctagtcttattacaatgaacaggctaaagacaaaactactctctggagattttcatttctttttgaaacacctttgttttcttaatatcagaccttttttaggttcattatgtcttcaatcagcttcttatgtatggttcgatggtgtta

SEQ ID NO: 26061 - DNA, 496 bp, Arabidopsis thaliana columbia
ggtatctttcggaacgaagaacttctcggagcagaagctaatacatctgaagaagctacacgacaaagcaaaggccaacctggtctaaattcaggcagttcttttaccagcattgtaatgaatggggtcaaatcttctggaaattttgcaggaacaagtgccattgccttgtgcaaatcagcattatcatcttgatcaccattacagctagacgatcgagataaatttccaggcgtaggcaaggaattcatatcacgaaccgagcaattcccaaggcatgcatacactaaagaccgccgaagactctgaccattggaatgatcttcctctgcctcttcctcttccacctcagaatggtttactactttggtattctttctcaatgtgacaggcatctgaaagaaactagacaaagtgttcctacgagcatcacttttacctattacgaaccaatgcccaagaaagaagaagagttcacaaccctaatacagacaca

SEQ ID NO: 26062 - DNA, 428 bp, Arabidopsis thaliana columbia
  unsure (1)..(428): unsure at all n locations
gacatgtgtatagcctcaaatccaagtttgatggagttcgacccgttacgcctcggaacctgcttctagcggtgtgcctgtatggtctagtatcattgagccccatgttccggtgtcccattatggtttctaagaatccaacctccagtagcctttagatcttgcaccttaaaactagcatcgaaattgcattttgtgtatggcatatgtgggtaaaaaaaatttctatatatgaatatgaatatgaactattggtagaatcaaaatcgcaacttaacaaccgttaacgagcattacagaatcaacatttggcggtgttaaattttaatcttacatatttttatcgatatataaacgatttttacaagaatttaggcttatgttgtcatagtctagtgcgatttaaccccanaaaaaaattctagtgg

SEQ ID NO: 26063 - DNA, 531 bp, Arabidopsis thaliana columbia
taaattaattagtttgctagattatgaaattataacatttataaaaattaccgttttttagcatctgcaagtacaacatgccctaattgttgtttttataaatttctttgagcacaatcttttggctttgccatcaaataattatgctagtttcttacttgatgttacataacaaatgtgaacaaaaaaaaaacacaattgacgatctaaatatataaaaagattcctaaagaattctcgattgactctctaatgagttctaacatcagaaacccgacaattccgacacgactcattacgaaacaacccaatccgacaacacaaacacaccgcatcactctcatgagctccaaacaactcggaaccccaccgtcgagtcgactcagccgagtcaacaacactcactttccgagtcgactcgtaccgataactcggtccaacagagagttccaaattcaacacccaatcttcctcgttcccataatccttctccgacgtcgttccactactctcacaattattaaccatacc

SEQ ID NO: 26064 - DNA, 597 bp, Arabidopsis thaliana columbia
tttttggtaacaattattacaacagttttttgattgaaatttctttacaccataacaaaatccaaacgggttcgcgtgtctctaccaaaatttttgcagatacaacaactctaattttcttttcttcttcaatggttataacactatttgtcgttttagcatcagaaccaccacaacatcaacggagatccaacgaggccatagatgtttgaagaaagtcattttttgaacagttgtttcatgacatcgatccttttcggttcatcaggtcgtggtaataaagaagcacacacatcggttgtccgaaaatgcagaagatgaaccagaagatcatgttccccacctaataatatgatcccattccaaaacagatcacctttattattaagtttcagcattgcgatttaaatggctaggctatgaaagaaagagttattcgttctattttctggggttttgagagcataccgttgagccaaacctttcctgtagatagtttgtgatgaagaccaaaggcacctactcaaacaaattggctggtcagaatatgagattagagtttagtaaaaatcgactgcagcagtttagtaatttttt

SEQ ID NO: 26065 - DNA, 571 bp, Arabidopsis thaliana columbia
ctaccgcagtccgaggaaccattggacacatcgctcccgagtacctttccactggacagtcctcagagaaaaccgatgttttcggattcggagtactaatccttgaactcataacaggtcataagatgattgatcaaggcaatggtcaagttcgaaaaggaatgatattgagctgggtaagtaaaaaaattctatgagtcatttactcaacttagactgaacccataaggacaaaacttaaatctaaaccattggtttttgtaggtaaggacattgaaagcagagaagagatttgcagagatggtggacagagatttgaagggagagtttgatgatttggtgttggaggaagtagtggaattggctttgctttgtacgacagccacatccgaatctaagaccgaggatgtctcaagtgttgaaggtactagaaggtttagtggaacagtgtgaaggagggtatgaagctagagctccaagtgtctctaggaactacagtaatggtcatgaagagcagtcctttattattgaagccattgagctctctggaccacgatgatagcttcatagt

SEQ ID NO: 26066 - DNA, 379 bp, Arabidopsis thaliana columbia
caaaggcacctaagtctaccatgaaatagagcatcaaaaactctaaatcatttggaaatctttcttcagaaagataacaataccttcatagaccaaatgaagcatcataggtgtattggttatagtgggatagaattccaataaaccacgagacattcaatctaacaaatatcaatcgagaagcagatatattgacttaagacagcttgtttactccaaacaacgataagtttaggccataacagctgaagggaagaagaggaatattttgagaaaagatcaaaggaggacatacttcgttccaacccaaagtgacatgctccccgccagagagaccggatcccgaaaagtcaagcgtgaaaatcgtgatgtttgaagg

SEQ ID NO: 26067 - DNA, 537 bp, Arabidopsis thaliana columbia
gttaaaaaccgagacttaacttgataagtttgggccaggatggtatgctcaaaggaggtgtatggtttttgaaaggtgatccctatatgatcatctcatacttgtcggcaacgatgtttggattgcgagagttttctctcgtcgtacttgtgaccacccttttcagagattgggtgtcttggcacttcaggcgcaagtttggaacttcaaaagcatatgaaaccttgtttgtttcgtaaagcgatgtatctcaaggtggctggcttcatggcatcgtgaagcattttgtaataccgagtggctcacctccacgttggaacgcgttattcttaacatctttagatcattttatctcttttttaattgtattttcttattttgttgtttatctatccggatgttgcgtaatgttcaaggtatagcagcatgtgagtacttttatttccatataggtttatcggtttttgtatggttttccttagcggagactcttttatctgtaacttaataaaatggtgttagaaaaaaaaaaaaaaa

SEQ ID NO: 26068 - DNA, 308 bp, Arabidopsis thaliana columbia
gatgtgtcagatcaggaagtgaagattattcatttagccacatgcgtaagaaccagtgtgaagagagcctcttcaaatgtgaggatgacaggtcggttaatcaacttctaatggtggactggaaacctatattccgtagtttaatagatatgattggttactgacctgttatggtgagccattttctgtgtcaaattgtgagccattattccgctctagatgcgagaggtttgagctggacatgctgttagagtctgtaacttctacgagagagcatgtggatgacttattgacatggattggcagta

SEQ ID NO: 26069 - DNA, 643 bp, Arabidopsis thaliana
tcaaaataccacgctctgttgttttgagaaacaactgaagtataagccactttggcttgtggagtgcagtcatccaactcagaaagattccagttgcaaacaagatttgcctcgtcttgcatttctttgttgacctgattgtagacactggcgtaatgcatttcctcttcttcatacattctttctaacttgtaattgtacctttcagcttccatatcaccatacagatctttcttcttaatctacacagtgcagaatcttgatggctcaatgtagcactttgctaaattccacagtgttctgagtttctctttgaatttgtaacactattctctcatatgaaatctcttaccacaatgatcgcatcaaatcacacccaccatccttgttctcacaaaacattctccttttgtttcgacatgtgacttcacttgtttcttcggttcagtatagctttgtctcaccacagtttcacttgttgaaccaccactgacaaagttgatgactcttccttcttccttgttgatctttcctgtataaccttgataacccaaaccccttggttgagaatcagttctgcccattgccaagatcttgtctagactttctgaccctttgttgagcacctgatctgtttgtgttt

SEQ ID NO: 26070 - DNA, 430 bp, Arabidopsis thaliana
ctgtatagctttgtctcaccacgggttcgcttgtctgtaccaccactaacaaagttgatgattcttccttcttccttgttgatctttcctgtataaccttgataacctaaacccctctattgccaagatcttgtctagactttctaaccatttgtttagcattctgatctgtttgtgtttgtcattcaactctctttccacaagtttagctctatttctttccatgtgacactcttcctgaagacgctcaagtttcttttgatagtagtccggtgaagttccaacaacagtgatctcactcagattttgcttatcctctgtgctcacattagcaacttttgcttcaagagttagcttttcctttaccaattccagtttctccttacttagttgcaccagttgtcatcaacactctgtattcaccttggga

SEQ ID NO: 26071 - DNA, 523 bp, Arabidopsis thaliana columbia
cacctatcaattctgctgcatcctctttcaattcatgggcctctgctcctgcttcttctatatcttcttccccgtttgttctttcattcactgacttgacctacagcgtgaagatccagaagaagtttaatcccctcgcttgctgcagaaggtcaggaaatgattcctcggtgaacactaagatactattgaatggtatttcaggtgaagcccgcgaaggggagatgatggcggttcttggagcaagtgggtccggtaaatcaacactgatcgatgcattagccaaccggatcgcaaaagatagcctcaggggatccattaccttaaacggagaagttcttgaatcaagcatgcagaaagtcatatcggcttacgtgatgcaagacgaccttctcttcccgatgcttaccgtggaggaaactctaatgttctctgcagagttcaggctccctcgttcactctccaagaagaagaagaaagcaagggttcaagctctgatttgacaattaggcctaaggagcgc

SEQ ID NO: 26072 - DNA, 533 bp, Arabidopsis thaliana columbia
gacccctgagagggattggatgatgtcaagcgacgaagccaaagcaatggtttttgcatcaaaggctaccagatctttgcacaagagttaacaatatggattctcttcataaaatgtatgacaaagaaaatataggaggaagatgagtggatttctaagaatgcatgcctcttttctctactgtggtcaagttcaatcagtttacagcagtttctggggagcaaaagtgaatagagtggctggttagagaaaagtgtttgtaacagtttaatcttgtttccaggtctttcaattgatgctacggtcaaagatacgttaaactgtttataaaatgaagtgtgtatttttgcattttcttatagcaactcttgccaacaaaggtttagtgtaacctgaaagaaaaaagatgctcacaaaacttgctttattgggatcttaacataagaagaaaacaaaaggcgaaaaacactttgagatcacttggcgctcaaactccggatgacgtatggtagaataccgccgtgatcatagta

SEQ ID NO: 26073 - DNA, 466 bp, Arabidopsis thaliana columbia
tacaaaggaaatgctaaaaaaccaaaccaaattacacccacaaaaaccaaaaagagtacaaagttactaacctctgccattttttcatcacctataaagggtttcgatggcaccgtgcgatgaatcacattcagattcttcatcatatcaacaacttttggtgataagagagtggtgtttcccatccattcaacccctattctgaactctgatggagtggaagtagttaactacaagctttgaatggtgtccacgcgatcaatcacatcgagagctttcatgcgatcaatgtcaaaatcaatgatgggaacagaagaaggtcttctggttgagaaagtatccttcttattcttcatcatctcgcccatcattggtgagtggctactgcttttgcttagcctatggtgcttacaaagacgtgctttagcaccgtttcaaactcttggctcttgcttattcctggcgt

SEQ ID NO: 26074 - DNA, 804 bp, Arabidopsis thaliana
caacattacaacttctttactcgatctcatcctttgtttatgtgccggtcattgagctctctcccatccaactttcaaaactatatgacccaaaaagtcgtcccttgtaacatttaaatttagtgaacaatcaattcggatgatatatatattaataagatccattaaatttgggttttcttacgtgaaataaagatgaaccacgaattttacctaccaacaatattaaaaacccgacaatacatggtatttctgtatttaatccacaaggtccacaaccattccatattcatattctctctttaattaacgtttgctttctcttccatggccaactcccacgtggcagttctcgcttttccattcggcagtcatggtcaggctatcctcgccgtcacccgtcgtctcgccaccgcagctccttccaccgtcttctccttcttgaacacctcacaatccaacttctcgttgctctcctccgatcttcctccgaacattcgggtccatgacgtgtccgacggtgttcccgagggatacgtgctctcgaggaatccacaggaggcggtcgagctgtttcttgaagcggcgccggagatttttaggagagaactcgcggtggcggagactgaggttggtaggaaagtgacatgcatgctcacggatgcgttcatcatggttcgcgggggatatggtggcggagatgaaagtgtcgtgggttgctttctggacctccggaactctctcactgctcatctctacatagatctcatcagagaaacaatcgctgtcaaaggtttatatata

SEQ ID NO: 26075 - DNA, 558 bp, Arabidopsis thaliana
aagttagaaagaatgtatgaagaagagaaaatgcattacgctagtgtctgcaatctggtcaacaaagaaatgcaagacgaggcaaatcttgtttgcaactggaatctttcagaattggaggactgcactccacaagccaaagtggcttatacttcagctgtttcttaagacaacaaaacgtggtattttgacagtgggtgttctcgtcatatgaccggtgttcaatctgttctaaatgacttttctgtcatcaacaatgggaaggtcacttttggagatggtggaaaaggaagcattaaaggaaaagggaagattgagatatatgatcaaccgcatctgtcaaatgtgtactttgttgagggactcactgctaatttaataagcataagtcaactgtgtgatgatgacttaactgttacgtttacaaagactggatgtgttgcgctcgatattgctggcaacaatgttctatcaggagttggttcaggcaacaactgctacatgtggaaagactctgaagtctgtttgtttgcaacacatccaagcttgatttgtggc

SEQ ID NO: 26076 - DNA, 532 bp, Arabidopsis thaliana columbia
taactccgggagcgatttcacagtgttcatgagatgctcggtgtggatgtttccaatcagatctgtcccatcaaactcagcgccgctcccacctccggttttcttgttaacctcttcaacgtctctcttgtacttgttcaactgtgtttcgatctccacagcgacatctggaaactccagagtactgtttgctgaccagaatgggtccgaactgtccagctcaaacgatttcggtggtcctttctctccctgcactttcaattggttgagctttaacccgagaacatcgtgaacgagaggccggtatctgaaatcatgctgaatcccaaccgagagctcaaagttcctatcaaatatgcacaagaggggacgctgaaacgagctcatgaaaccgccaccttcagtaaacagattgttcttggacaaaagatgatccctcagtttctgatccaacaaagacgccaccatctctgcaggtccacactagggcatcggataacaggaccacaccaagcgttaccacacacaaaac

SEQ ID NO: 26077 - DNA, 594 bp, Arabidopsis thaliana
acacaccagattttcattttctgtggtcacaaacccttcaggttgatccatatatacttcctcctcaagctctccatttagaaaagcggttttcacatccatttggtgaagctctagatcataatgagccaccaaacccataacaattcttagagaatctttctttgaaactggagagaaagtctctttatagtcaatgccatcttttaggtaaaacctttagcaacaaggcgagccttgtatctttcaatgttacctttcgagtcacatttagtcttaaagacccacttagaactaatggttttgaaaccgtacggtaactctactaagtcccatacattgttgtcacccattgattttaattcttcttacgcgacatgaaaccatttttcagaattgtcactttccatggatttttggaatgtgttcgggtcttcatcaatgcttaagccacatttactttcaacagcataaatcacatagtcacttgaaatggcagacctacgttgccattcagatcgccttaatggttattgtggtatgcatttcttcttgaatagtgcaggtcattgtttgccctcatctagtgaggtt

SEQ ID NO: 26078 - DNA, 498 bp, Arabidopsis thaliana columbia
ggaggttatacaacgacataaagtttcttcttgagcaaaatgggttctcatgggatgcaaggagagatatggttattgcagatgatgacatttggaatacttatatacaggcatgccacattctttttctttttaagatatcagttatatgtttatgcttacaaatgaagcatgtgcaggcacatccagaagctagatcatatcgagttaaaactattccaagttatccaaatctttgcttcatatttgggaaggaaacgtcggatggaagatacacacgtttggctcaagcttttgatcctagtcccgcagaaactgtgcgaatgaacggtaagcttctcttttgcattgtctttgagatatgatatttttgtatgtaactctatttatatgaatccttctcagaaagtggaagcacagatggatttaaagatactcgcagtttccagaaggtggtctataccagcaatgagaaaaatgattacccgtgtagtaata

SEQ ID NO: 26079 - DNA, 512 bp, Arabidopsis thaliana
ctagtaacggcaggatcccccagcagcacatatcagagcttggatgggtgattttgaccatataagaaatgtagctaaatatgctgcaaggcttggtcaatcttttagctcttcaagagagacacttaatgttaggagtgatgagattgaagtgattcctgatgttgagattatatctttagggacacgctatgtgttttccgatggaataggaaagatatcagctgaatttgctagaaaggtagcgaggaaatgtggtcttacagagttttctccatctgcttttcaaatccgttatggcggttataaaggagtggtggctgttgatccaaactcatcaaagaaactgtctctgaggaagagtatgagcaaattcgaatcggagaacaccaagcttgatgttctggcgtggagcaagtaccaaccttgttatatgaacagacaactgattacacttttgtctactcttggagttacggacagtgtgtttgagaagaacaaagggaagttgt

SEQ ID NO: 26080 - DNA, 381 bp, Arabidopsis thaliana
  unsure (1)..(381): unsure at all n locations
tnnnnnnnnnnnnnnnnnnnnnnnttaaagacgcttgaaccttgttggatctgcgcattttttgctgcctgccatgccgttggagaatatcagaaaggaaaagcgctttatcatctgaaagcaaaggcggtactttaaacggccccacattccctttagggacgcggacatattccgcctgcccaccaggaacgccgccatacaggtgactataaccaaacaatgccgctggagctggtatctgttttttattgagcgcacgcctttacccgcattggtattttcgcaggcggcatattgttgcaatcgacagaaaaaacagtcgccacaagcaatgacgaacggaattaccactcggtcgcctttttgcaaattttttac

SEQ ID NO: 26081 - DNA, 598 bp, Arabidopsis thaliana
aacggccgccagtgtgctctaaagactttttcatgcagcgcacaaagccttcttccgtccagaccgggccaccattggcgtcgatcaatttatccacaccgcaggagatacagtcgtcgatcagctccagcactttgccatacgggttaaagtacagtcccagcttggctttgttcggtaacttttcatgtaaatatttgattggcgatggaatattcagcagcagtagacggcgaagaccgttccacattgcctgcttttgctccagcgggttatcaaacagtttgatcgccacactgtcgcgctcatccaccagcgccggccacgccttcactttgtagttgccacgcttctgttcgtagctttccggcagctgaccaaaactccagatatgtaagccgctctgctcgataccgtcatccgccaccgcagatagcgtttcctgcactttgcctttcagcgcatctttcagatcttgtagcgagcgcccttcttttagcttcttgtttttgtcatccaccacgcggaaggtaattttcaggtgatcgggcacctgatcccagtgccagtcttcgcggtcaacggtaacgccggtcat

SEQ ID NO: 26082 - DNA, 507 bp, Arabidopsis thaliana
ccataaacatactagaaagaatccaatacatgagaagtgtcatgcgtgacagagttacgccatggaggaagtccaccgttggctcgaagcaagtttccgtatctagtcttgagcttcattttggaaccttctctcaccggttcccactctacggaggagtcgagtcgagccggtttagacaagaccactttacgtccagtggctccgagcaagaaccgctcattcgaagcggtgaggtagttaccgtagcagctccttaaacggatcacttcaaaggaaccacgaaccggctcgacaatccatctagctctcttgtcggaaccattcctgtcttgagtcaccgtttcctcgtcctcatccgctgttagatacttatcatggacgttacgcatccttacggctttagcttgattgaacaaaaatcatcttctaatactatgcgaatactatttctttcttgttgaagcttaagaagtgcattctttgcacaagacgaattaatgtgga

SEQ ID NO: 26083 - DNA, 601 bp, Arabidopsis thaliana columbia
aaaccaaaattatcatctcagagatcaccggagcttttaggcctggtgttctaacagcgttgatgggaatcagtggagccggaaaaaccactttactcgacgttctagccggaagaaaaacaagcggatacatagaaggcgagatcagaattagtggtttccttaaagtccaagaaacattcgcaagagtctcaggctactgtgaacaaacggatatacactcaccaagcatcacagtcgaagaatccctaatttactccgcttggctccgtctagttccagaaatcaatcctcaaaccaaaatcgtaagccctaattctacagagcatcaaaactgtgacctagaaatcgaaataaagaaatcacttgtgaaaattcgtgcagagatttgtgaagcaagttctggagaccatcgagcttgaggagatcaaagatgcgttggtgggagtggcgggagtgagcggattatcgacggagcagaggaagcggttaacagtagcggtggagttggtggcgaatccgtcgattatattcatggacgagccaacgactgggttggacgcaagagcagccgccattgtaatgagagctgtgaagaatg

SEQ ID NO: 26084 - DNA, 578 bp, Arabidopsis thaliana columbia
ggatccccgacgaaaagggaatagccataaagacagaagagttggactaggcctgatggtgcagagaagtatttgagaacgacatataatgcgagaggaacaattgtgacatagccatagaatactcctgcagaccaagtcactagattaatatcgtagttccattcttgtttcttccatttgtgtgctatgtatgtgacaaatgtgccgatagatgctgcaacgaatatcaaggtggtgcagatccagaatggaccatacctgaaaaatataatcaattttttgagcatttgagaattcacctctaagttgaaaagagataagaaagacgaaactcttacaagtcaggtttatcagctgtcttctctgtaaatgttccacggaatgggaaaagggattctttgagtctctcaactacatcggaagtgtcgacatcaaagaagggcttgtaagcaccaacagtgaatttatgaagccagcaccagactgaggtcatctgtactaccattccatgccagaaaatgaatctgaacaatcaaaattatctataaccttaagatatcagaatgcaaagatgg

SEQ ID NO: 26085 - DNA, 544 bp, Arabidopsis thaliana columbia
ttcttttgctttaaattcacactaattttccttcgctttagttaccactgtatctgtgtatagccttagccttatcatacactaaaactgcgcctggggctaatttagcagcaagaggattagccatctcacacgagagcctcagtttctcggacaagtcaacggtcttctcatcggacggcgtcagcattcaaactcatgcaaaagcgtcgcagtccaaaacgtcacggtggtcaaaccaagattcttcccggggcaaacccgacgaccggacccgaacggtgcaagcctcaaatcagacccaagaaccgagaactcaacctcaccttccttggctacaaaacgttcgggtttaaactccaacggattctcccacacgtgtggatcgtgtgcaatagcccacatgttcaccattgcggtggtcccgccggaacacgacgaccgtcgatgatcgtgtctgtgattgctaaacgggcccatgagagtagtgggcctggcgggtgaacctcaagacttctttcacacagccgttagatatactaga

SEQ ID NO: 26086 - DNA, 157 bp, Arabidopsis thaliana columbia
tgtatggattgttgcttctgttgccatgactctgccacattaatggatgtcgtgtttcttgaactttcttgatatttttgtgtattctcaggccgtctttggaaggaattccctcaaagacgaggtacgagtggaagagatgtctcgaggcctggaa

SEQ ID NO: 26087 - DNA, 632 bp, Arabidopsis thaliana columbia
  unsure (1)..(632): unsure at all n locations
nnnnnnnnnnnnnnnnnnnnnnctaaagctcaacataggctgcttgggcttcgtgaagtgaactttgatctcttaaataatgctcaatactccagatgtcaatttgacaaaacgatgaaggaatggtattgagatggtcgaagcgcaagtacaagagcgtgttcaccaatcagagccgtctccgcggacaancaatttttatcttatcccctcacctggcagcttaacttgatctttaacaacacactaaacactgcgcaacatttgatcacccttacaaactcacaatgggtaaacgcaagcaaatcaaagatggtgacgtctccatgggcggtactgaccctgcgaccggcgactcctccgacgaagacatcgacatggttaacgtcgacttcgaatggttcgaccctcaggagattgactttcacggaatcaagcacctcattcggcagctcttcgatgttgatgcgcaggacctcgatctttccgggttaacggatatgattctcgcccagccattgctggggtccaccgtcaagacggatgggaaggactcagatccgtatgcctttttgactgtgttgaactgcaggaacatgctgtatgtctgactacttgaagcgttgattata

SEQ ID NO: 26088 - DNA, 433 bp, Arabidopsis thaliana columbia
actctaagagttagagaagaaaaacatttcaattgattcacaaaaaaacaacgataatacaagatagcttcaattattctacgtaaggaaagaattcgtttccataccccaactctgacatgtgtctttggacgcagctcacggggaacataagcttctgctttgtcaagaagagacaccaaagagtttgctgcttgtcggggatcagtaggatatgcgctcaaccctggttttagctgaaatcaaatcagtatatagcttagagataaagttccaagaagcaccactaaactgcaaattacacaagagattcgagccaccgcaatgtgatgaaactagtaactaaatgatgcaagcgaggtggagttcaagttttatcttagaattccaggtacacagagctcaagtcaataatatacattgaaagcaaagt

SEQ ID NO: 26089 - DNA, 553 bp, Arabidopsis thaliana columbia
cgtctctcaactactccattttgctaaggagtgtaaggcgcggtgaggtgcctaatgattcctttttcttcacaaaatgtctgaaattcttgagataggaactcgcctcctctatctgttcttagtgttttgattttttctccggtttcttgctcaactgttgctttaaaagtcttgaatttttcgaatgcttcactcttctcctttaaaagaaatgaccacatgaagcgtgagtgatcatcaattagaactagtatgtaccttctctttgcagctgtaggtggtgaaatgggtccacacaagtctccatggatgagttctagaatctgagaagcacgataagtagtagctttcggaaaaacttgtctcgcttgcttcccaagcatacatgaagcacaaatctccttctcctttggggcactaggtattccaatcacaaattcttttgttaccattgcctttatggtctcaagattaatgtgacctaatcgagcatgccactttgttgagtcattaagtgccgcaagttgtaacacttagtgtttcgactttt

SEQ ID NO: 26090 - DNA, 569 bp, Arabidopsis thaliana
tacattctgctaaaaacaccggtcgccatcgaaaatgcacaggtcatttcacatatgtgtagggagatgctttcagtttgtcccattccctggtgatagaaaatatagcagtgagcacgataagttgcaggattacaagatgaatatcaagaattaagtagatacttacaagagtatcatgaattgtctccggatccccgatgaattttccactggcaagcataatttctcttcccatttgttcaaccaacttatgcagggttacatatccattacttgttatattgatgagagatttctctgctaaaactctcatccacaagttactttccattctgctaacatcaagtagtgaagtgacacgccggaaagtgtctccattaaagagacatgcaacatggagaaaagcattctgatgtgcttttgctaaaccctcgtagctaattttcaggatttccattatattctcgtcaggagtactttcaagtccacatactgcttcttcccattcttcaggagagttggccctccacggagaaataaggcataggcttgaagggcagaaggaa

SEQ ID NO: 26091 - DNA, 590 bp, Arabidopsis thaliana columbia
tcaactaccatccctttcagagtgaacatagaccataaatcttctgcttttccgactcaacgcctgcaacaccaccgggactcctcgtttcaaaaacatgagaaatttaagcagcaggcattctcggcgtttagttacctgaggagtgtttgcattgcttggactcccggttcctgagttatctattccatccaccatttctctgttcccaagacagaagaaattgagataatcttgtggggagaatgctccttcaagccctgtctccactaacgccttgtagattgtctcatacatcatctgtattgtcttgtgctgcaacgatgataacactgactatcagtttcataatctccatatacccagacagaactcatgtaagaaacatgaatcttacatgcatatatcttacttccaaaaaatcgttcaaccatattggtgatctatgaacattgaaatcaatattatctctactagtctctactttagttttgtgattttgatttgagaaacggaaggaagattttggctaagacaacaacccataagttttactcagacatacctgccaataaagaacctctgggtag

SEQ ID NO: 26092 - DNA, 498 bp, Arabidopsis thaliana columbia
  unsure (1)..(498): unsure at all n locations
nnnnnnnnnnnnnnnnnnnnnnctaaagcgttgaagtacaaccatgtttcaatcgggatgtattgcgcgatctttctgatcgggcgaccaccgctcgtatagagcttgaagcttgggcggaaggagagaatattcaattcgacacgacccgaccgaccgaccgcacgaccacctttcaaggttttgggtccgaagaagaagaccttgaccttcaagttctacaatctgccaattcagggaatctgtatgcattacgcgaatgggcagacaaactacagaaatcgggtgattcgcgagacgtgccacacgcacgtttctagccgcgatcagtgaatattccgacgatgtcctcgctgtcctcctcgaaactggtttagtagatattttcgccgaggatgatattaacgagcggaactgtttacatgaggcggccatatctggccggagttcgttctaaagctggctcgagcgggtgtcaggtattaggccgatgtttcg

SEQ ID NO: 26093 - DNA, 566 bp, Arabidopsis thaliana columbia
  unsure (1)..(566): unsure at all n locations
nnnnnnnnnnnnnnnnnnnnnctannattagagttacttcatcgagaggagagtggtggaggtggttgttgcgactccaagagagctaaacaagagtttcgttgtcttctctttctctctatcctctcttgctgtttcgtcttgtctccttattacctcttcggcttctctactctctccctcctaggtactactatttctcccacacaatcttaacttcttcttcttttttggtatttctacttgattcatcacttatcttctctgttttttactcttctccagattcgtttcgcagagaaatcgaaggtcttagctcttatgagccagttattacccctctgtgctcagaaatctccaatggttagtcctgctatgtcacctttttaccaactcctgaagaaaactgagtttcgatcttttcatctgaatattagaatcagagttagtgtataatctgcataagacttacggttatcgattctcgtttatgcacgcaggaaccatttgctgtgacagaaccggtttgcgatctgatatttgtgtaatgaaaggtgatgttcgac

SEQ ID NO: 26094 - DNA, 450 bp, Arabidopsis thaliana columbia
tcggctttttcgtactcagcgatgacgttatcggttgtgagctctactcccatggagtatccatatagcagcacgaaaacccatgtcctatagttcgtgatcgcgtaccataaaacctggttaatttgtccaccagaaaactgtgagtcttactcttaaccaaataaaaagatctataacaaaaaaaaaaaagagaaaacaaaaaatctatggaagagtattataaggatttcgctttttctatatgaaaacgtaattgttttttttttttttttttagttagtcgaatcgctttcttggattaatttaatgtctctatctaaatgttaatctaagatctatatcagaacaaccttctttatatattcaatgaaaataatataatttagacaacgatctgcagaccctaatatataagactaagaatcaaaggatccaagaagaattaac

SEQ ID NO: 26095 - DNA, 567 bp, Arabidopsis thaliana columbia
cgtcacttgaatgttcgaggaaagagtgcgactcttccatccattacaggttgataccagctgatgtttttccaatatcttgcatcaaggagcttttctaataaaatgtttttgagtggttatattctggttttaactccacgcagacaaagattgggaagacataaaatttggagtggacaaccaagtcgatttctacgccgtctcctttgttaaggatgctaaagttgtccatgagttgaagaactatctcaaaagtaagcctggtcccttttcttcactctcctattatctttggtgaaatttctgtgaaactaatagaagatttccaaaaacatttatagcctgcagtgcagacatatcggtgattgtgaaaattgaaagtgcagactctataaagaatcttccttctatcatatctgcttgtgatggggttggtttcaaagtcttttctgtcagagtttatatgttgatacttagcgcagagccttagcttatataattatcaatgctttttcaggcaatggttgctcgtggagatcttggagctgaacttcccattgaaga

SEQ ID NO: 26096 - DNA, 613 bp, Arabidopsis thaliana columbia
  unsure (1)..(613): unsure at all n locations
ccttatggatcatggtcgaattgttgattccttacagtaagtcttcttccttgctactagcaattcaaatttatctcctcgtgaatcattaggataagaggctgtgaactatggagtaaatgatcggacccacgaaccaatttagcaattttcttcgcagttgtatgataatcaggaatctgttgatatatttgttgtttaaatgttcagaatcttatggtgaatcttgtctgctattgatcttaactattcttttacccttttggtacttccttgaacagaggagaaatctctgtgatctgtcaagacatccgacacttgaaagagaaattcgacaaccgagtgccattgagccaatcaatctcctcaagccagactagctgtaaactggcttcttccgcctcatccatgaagagcttattgacggagaagcctttggaagcatcttatgaaacacctgaagcctcgagcaataacaagagcccaaaagcttctgttaatgaacgtaaggagcttctggatgacggctgggacttctttgacaaagagacagagctctaagtgtcntcttttcagtagattatcggtgctagaataaagagatatgaaggga

SEQ ID NO: 26097 - DNA, 591 bp, Arabidopsis thaliana columbia
gctgattacatgaatctgcttgaaagactgattttgtgaactctgaagagaaactagatgatgagctatattgttacataggcgattagtgaatctaaaagtaactgatgaaaattttgaagaccaataatctatatcatgcagaagactagcaatttcacaccgagaagatttgccattgatcgcattgatgagcacctcgcaaccaccttcaaattgaaccagtctgtaacctcttatccagacttgttgcattgccacaatgagagcttttgtttctgcgtccaaaggggtgatgacatgatccaaaatcgatgagccccaagctttcgcttcgccgtaatgatctcgtaaaatccaaccacccatgccttgctcgttattttcctgaaaaccagcgtcaaagttgcatttgacaaaaggagctgcatgtttcatccacgaagtttttccttttgtctgtattctcgcgggaagcgacattgcttgcattccattaataattgttgccagtcatatacttctgcgactgtttgttgaattacattgatggacattctctgtagttattgagcacaagattgttgtgag

SEQ ID NO: 26098 - DNA, 1461 bp, Arabidopsis thaliana
cattatggatattcatatggaagtcgccgtcttttctcatagattcgacctggaatatgagacatattatgtaatttagttttgaaatgcaaataaatatttttgattacgagaaagcttaaaagacctctatataaatatgtatctgtcaaacacaaaagttacatgtatagagagaaaacaaaagaagagtagacttcccatcatcctccgctataatgcgccactctccgcgttatctataatacgctagtattccgtgcccgctataatgcgcaagtctccgtctcagcctctcttcgccgtctgatgtctgatcttctaggtcacctccacaaattcgaacaagaatttgtctttatgtgcaaaaccaaaatgggagtcaatgcttcagagccaaaacgaacacgatcgcgaccaagtcaatcgcaggggaggcatccgtcgacgagacgatctccgtcaacgagcaacaccggcacaacaacaaccacgacgacatcgaattctaacaaaactggtgcctcctcttcctcctccggtgcggcttcttcctcagtcgctagtcgaacatctctcgctagtctccgagaatccttaccggaaaatcctcacatatacaacgtctccgagattcgtgccgctaccaacaatttcctcgctaatcgcttatcttcctcttcctctaaagcctcctggcgttgcaatttaagagggaaagaagtcgttgtgtttcagagaaagtttaggcgaaggatcgacacggatgagcttagagatcgtctttcagatatttgccggagccaccacggaagcatcattaatctactcggcgcttctgtttccggcggtggaagagtaggaggaggaggaggaggaggaggtgatcacatctacttggtctacgaatacgtcaacggagcatctctagctgattgcttgagaaaccctaagaaccctaaatttacagttctatcgaattggacttcacggattcaaattgcaacagatctagctcatggactcgattacatccacaacaaaaccggattaaagatcgaaaacctagttcacaatcacatcaagagctcggcggtgatcgtgacggagccagatttcaacgctaagatctgtcacttcggaactgcgcagctttgcggcgaaacagatgaaatgtcactggagagagacgaatcgagaaattcaaggcgatctgatagcagagcgatcagattcgaaggagttagaggttacatgtcgccggaatttcaaaatttgggaatcgctactcagaaatcggatgtttacgctttcggagttatgatgttggagcttctctcaggcgaggagccgttgaagtacaggtatgataaagccacaggagatttcgagcggacgtcggtgattgaaacggcgagagcggcgatcgaagatggagatggtgatagagatggaagactg

SEQ ID NO: 26099 - DNA, 522 bp, Arabidopsis thaliana columbia
tttgcaacaaatatggaactaccctgagctgatacgtgaaaaacaaataatcaaatgagacaaaagcaagtagaagaattttcaaattcattgtttttaactattaaacaatgaataaccaaccttgtggtttaatgctttcagcagaagcctgtttacgaattggggaaggagctttgcgctccggagcagcaaccggtttttcgacaggtttacgcttgaccggcgaggctttaacctgtaaagtaccagcgctttgagccagagattgaacctgtaagtttgaaatcacaccaacagattagaggatattatacgataaaaactaagcacaaaggaggagacttacaattaatgcaaacgatttcttgggaacctcctcttgaagttttgcttcagcagctttaggtaagctactgttttcattcacaactttctcctcagggactttcgcatgtccgtttggtatggcacttgctggcttcgtcaccgtagttttagcttcagtagggacaataaccg

SEQ ID NO: 26100 - DNA, 438 bp, Arabidopsis thaliana columbia
tgcccatttcatcaagttgttggcctatcagttttgtcttatcatccactgcttgaaaatcttgttctagtcgcatgaaaatctcctaataaaattttaagatagttaagagactttgttgtttttttgatggtcaatagcaaatggtagtagatacccgcatttttatgaatctatatcatattccaaacaaaagacttccaaacaggagcgtccatactagagacattagagatccagaatcaaactttcaactttcgacccaagggctggtattagtcttacaacagccacatccacaacaagaggcaagctcttcaacaaaaaagagtcaatcggctttatgattgagttaaaacctaaataccaactatttcattggtaatttgatctgcaaaaacatacaataattaacataatttaaattttttggcatat

SEQ ID NO: 26101 - DNA, 442 bp, Arabidopsis thaliana columbia
gctaacacataaaatcattttaacatctagatacgtaaatatcaataagttattgcttaaaaattctactatatatatatatatatatatatacaccatgcttaattattaattttgacatgcgtgatgatctttcaaaataaaaaggaaacggaggatttggctagggacgttcgagaccgcagaggaggcagcaagagcatacgatgacacagacgttttaatgagcggccgcaacgccaaaaccaactttcccctcaacaacaacaacaccggagaaacttccgagggcaaaaccgatatttcagcttcgtccacaatgtcatcctcaacatcatcttcatcgctctcttccatcctcagcgccaaactgaggaaatgctgcaagtctccttccccatcccgtcactggctccgtcttgacacagccagctcccatatc

SEQ ID NO: 26102 - DNA, 537 bp, Arabidopsis thaliana
taacaattttggtaccgttttatagttcaatcgctctcgtcggtgatgttactatgaataacaaggatatcctggagtttgttgacagaaaaacctttactaacaaggtcgtctatcgcactattctcagtgttaccagataatttttatattaacatcgacaatattgtgatgtcttggccttattgcaggtgatggacggtttgttaaaatttagcaggcatgtcctccagacaggtgaggtcgatggcaacaaacttcgtgtggatgttcttgatgccaagtttatctctcaactatgccacctgtatcccaagttttgcaaagctcatgttcctcaagattttcagtttactacgtcgttggttgatgcgatacgtggtgatggcgactgttgacgccttcagcttttcacggatgttgattacttctatttgccattccatttcgataaaaaaaacattgggtagccttatgtgttgattcaattgtgctaagataatggttctcgactgtaacattcatttgcgcattgat

SEQ ID NO: 26103 - DNA, 229 bp, Arabidopsis thaliana columbia
aacggccgccagctaaagtagccccatcgaaaagctcatgtaaacaagccaaagaaacaataccttgagagaatgaaggaaagagtcgaaatttgggacagagaaacagatatgatgacccattgggagatggctaggatccttaaccgctgaggtagcactgtaaggaccttctggaagatttgttgaagggtttctctggataatatgcattgcaaaagcacctggt

SEQ ID NO: 26104 - DNA, 530 bp, Arabidopsis thaliana
taacggccgccagtgtgctctaaagccggtcatgtttttacatccggcactgtcgccgcgttctatcaccaggacatccagcccggctcgtgccatgaccagtgcggcaacctaccagcaacgcccgcaccgaccacaatggcatcaaatttgtcatccgacatgcgttatgctcccttcccgctgcgtttacagcgggagatgtggttgaaaggggaattagcggctcaactggctaatcagggcagggacgactttgtagatatcgcccaccagaccgtagtcggcatagttgaagattggcgcatttttatctttattgatggcgacaatcacttttgcgccgttgccgccaaccatatgctggatctgcccggagatccctgcgtcaggtagagatcggatttcagcaacacgccggagacaccgatataacgttcacgctccatccagttctcgccttcgcgaattggacgtgaacagccgacttcagcattcagcaccgccgccagttcgtggaccatttttag

SEQ ID NO: 26105 - DNA, 550 bp, Arabidopsis thaliana
agttgcagcttgtgcaaacattttgttggagatggaggtacagtgagaggaattgatgagaacaacacagtgattgactcgaagggcctgttcggaattcacatgcctggatattacaatgctgtaaacaagggtgttgcaacaataatggtgtcttactctgcctggaacggtttgagaatgcatgctaacaaggaacttgtcacgggtttcctcaagaacaagttgaagttcagggtaagaaatgatacatgtggattcacataatcttctgtgctatggttcttaaggcccttctttctgtttttttctgcagggttttgtcatctctgattggcaggggattgataggatcacgactcctcctcatcttaactattcatactctgtttacgcgggaatcagtgctggaattgacatggttagtctcaatagtgattctatcttacacatctatggtatgcgctccatggttgcttgattgttgtgcttgtgcttctgtttaattgcagattatggttccgtacaactacactgagttcatagacga

SEQ ID NO: 26106 - DNA, 570 bp, Arabidopsis thaliana columbia
tactgtggcagtcaagcggtaattcatctatcaaacaatccgctgtttcacgaccgcgcgtactaaacacattgaagttgactgtcactatgtacgagatgcgataaaagctgggatcatttcaacacatcacgttaaaacaacggaacaactagcacaaatcttttgactaaagctttgggacgtaatcacttttgttacttatttttacttattgggacatacacgcaacatcttgagagagagcattaggccgtatatattgggttaggccatatgaaatatattgtacttgctcggccagttagtgtagggttttgggatagcttctctcatttgtataaatacgttgtattgcggttaatcactcaaccttttctctcaatctcaccataacgctgcgtgtaaggaattaactattgtaatctatgtttatgtaaaacgttattgctaatctattaatgtctttcagatatagagtcaatctacatcgccattttaatataaatgatggtatgttatgaaatcctaatatattagagaaaaatgtaatcttagtttacagatgtg

SEQ ID NO: 26107 - DNA, 620 bp, Arabidopsis thaliana columbia
  unsure (1)..(620): unsure at all n locations
gaaatacaatatatttttggctcaaataggttgtgctgcgattggggtggtagctttctccgtcttcggcccaggctggctcgcccggagtgtcgccctcgccgcttccatcgcttttatggtcattactcgtgccaatcaccctcctggtaaatatttacttctttaaatttttaccgaaatcagaaattgttttcttgattcaaagtttttgaactctttttcataaaatgatataatttcacatgttcgatttttgacattgttattataaaaaggaaaaatgatgcaaatgaatattttttttttaaaaacatctgacttagtgatttttagcccatattattttaaggaaagatttgaatcaaaccaaaaagcccaaaaagaaaccatttattcacccatgatctgaaaaatgtaataaataatctggcccccgcgactttaggtataccttcataaataacctgaaacttttggttggagcagaaacgtcccctttatatatcntcttcacaattttctcagtctctttaattaaggaagaaagcaaatgcgatttttatatattattgcttctcgcaattaattacatatttgagagtgatattgatatacta

SEQ ID NO: 26108 - DNA, 562 bp, Arabidopsis thaliana columbia
tgctaccactatgtttctccttcttgttgtatattatttctttaagaattttaaaagaagtcatttgataaatacaaacaccaatctctaaggagtttttactacatttcattgatcaataagtcacagtaacgtattgtgaaatgaaatcgtaaatatagtcacatctatcaatggtaaaaacctctttagaccattcaacaaatccccgaagctctcttaaacctcttctctcaagcgaaatctctgcacaccaaatcttggtttcacactcctcagtcagcagacagtcaaactcgcaaccttttgtcatcgacttccaccaaactgtcactcttcctccgccgccggagtttgccaccacacgaaacagattagaggactgttctgcaagtccataaaccttacggcactcaaaaccttccttgtcttcacgccaatatagcttcccatcggaaacatatagtaggcacgacaccttattaatcactaagcatgccttggtcgtaaagtaatgttttttcttgaaaacattttgaacagtgagatcaagtgatgtgag

SEQ ID NO: 26109 - DNA, 583 bp, Arabidopsis thaliana
gggggtacgtaaattaagactgaaaaaatcacctgaaaactttgatttcttgagatcttgactcaacacagatatagtaaactgagcgaactgactccagcctgcctccaagatagcaaaagaacctacatgactaggtatccagagagagaaaagggaccatgcagacaagtggacaataatactaacctggaagaagtttatcataatttgcaacacagagaaacaaggagagatgattacaaacatcacatccttgtggataaattaaaatatacctgacacattgaagacaaatagaacaacacagagcctcaacaatcacatcccgagattttattgtgacacaagatataaggatgagaaagataaacagatgccatgtaccatttgtaaccgccagcttcaaaaacattgctacgatgctcccttttagtgatttctgaaaatttcggaatcttccaagtatactgtccatataactcagagggtttcaggcctgaagaagataataaagttcacattacacagctgaaacattcatcaagagtacaataaagtaaaccaaacaaagaaggagaaa

SEQ ID NO: 26110 - DNA, 543 bp, Arabidopsis thaliana columbia
tctcttcaaagaaaaaaaaacaattttcataaacgttatcaatttaaaaaatcatcaatgaagaaaaaagcatatagaattgacttaaaataattgatagaatagcttatccgcgatttattataagactgcatccaaacacagttttttttttattctttgataaatcaataagtactgcaaatttttgttctttataaaaagaagtaatcaacagtcaacattcgctctgttttcgcttccaaataaacaaacaaataattataattctttcttacaagaaaataaaaagatatatataaatctttcgcactctctctttgcttgttggtggtgcatatgtagtaagtaggttaagcttaaagaactgatcggagaatcacaaccatggctaaatgtcaccggaataatatcggatctctcattcttgaccgtgctccttccacttcttcttcttctacttccggctaccatttccgtctctggagcaccttctctagatccacattccgtagaaagatcgtcgacgccgttagttgcggc

SEQ ID NO: 26111 - DNA, 592 bp, Arabidopsis thaliana columbia
gtagatcccgtacctatgggatatataattaggtgggacatttaatttggggtagttgagagatgatttgtaactaaatttcactctcagttgtctgtttttttcttcttcttgaggtttgatgtaacattgatatgtttgatggctaacagaagaagaggccgagtagaataacggagctagagttgctagtctcgcagcttcaggaggagctaaaaaaggcgaaagatcaaatctcagtgtctgaaacatcaaagaagcaagcagaacaagaagcagaggagtccaggaaacagctccaagaagtttcttctaagcttgaggagagccagaatcagtttgtggaaacttcagccttggaagaagaaaccgataaaaccgggtctcttgtttttcaaagtgtatctcaggagtgtgattgggagtttagtgctactgctggtgaaagagcaggattagctgctgttgctcatgagatccgacaactcaagcttcagattgagatggtggcttcttctgaagctggtcatgtgaacaagctgagttgtatactcagaggttcacttttgagaggaacttaatggcacgcttt

SEQ ID NO: 26112 - DNA, 370 bp, Arabidopsis thaliana columbia
caaaatcgccatgctgtggctgattgcccgaccgttgcaagtgccaaataaacagcgtcgttggtttgcggtgttgttagggcagggcagtgagtttgcctttgtggtatttggcgcggcgcagatggcgaatgtgctggagccggagtgggcgaaatcgctgaccctggcggtggcgctgtcgatggcagcaacgccgattctgctggtgatcctcaatcgccttgagcaatcttctactgaggaagcgcgtgaagccgatgagatcgacgaagaacagccgcgcgtgattatcgccggattcggtcgttttgggcagattaccggacgtttactgctctccagcgggggtgaaaatggtggtactcga

SEQ ID NO: 26113 - DNA, 370 bp, Arabidopsis thaliana columbia
ttgcttcgtgtaaacagtgtgtatctaatctctcggaattcgatgatgttaaaggacatcctggatttgacaagcaaggaactcgagttagacggttgatcaaagatcaaagtggccactctgatcttgaagaaggtatcagacgtctagtcctctgctctgggaaggtataaaaaaaaagatccactttttccgtcattaactaacaaagttcccacattctgaaatttaatactttaaatgtcaatgaatcaggtctactatgagcttgacgaagagcgaaagaagtctgaaacaaaggatgtagccatttgcagagtagagcagctttgcccatgtccatatgatctcatccagagagaactaaagc

SEQ ID NO: 26114 - DNA, 607 bp, Arabidopsis thaliana
  unsure (1)..(607): unsure at all n locations
nnnnnnnnnnnnnnnnnnnnnnctaaagcataacctttccttgcgacttctttatcatccattaatcggggaaagatggtgggagagtgacgaaagaaagtaaagcagtgaggaagtatttcggaatagcgcctgaaaggacgggcgggtgagtgatatcacccgcctgagtcattaacgcttcagagcgtcgcttaactcgtcacgcatgttcgccagcatggctttaacaacgcgcgggttaccagcaacgatgttaccggtcagcatgtagttatgaccaccggtgaagtcgctgacgatgccgcccgcttcacgaaccagcagctcgcctgcggcgaagtcccacgggcgcagaccgatttcaaagaaaccgtcaacacgacccgcagcgacgtaagccagatccagcgccgcagaaccggtacgacggaagtctgcacattcgttgaacagtttgccgacgatgttgatgtaggtagtggcgtactgttttgctttgaacgggaagccggtcgccagaatagtaccgtcgagatcgcgagcggtgctgccgcgcagtcggtagccgttcagctgtgcgccctgacgcgagtggcgtgaacag

SEQ ID NO: 26115 - DNA, 611 bp, Arabidopsis thaliana
  unsure (1)..(611): unsure at all n locations
nnnnnnnnnnnnnnnnnnnnnnctaaagcagcggcctgtacaccagcctgaccgaacgtctggttgctgcccaacgccacacggcaaacgaagagaaagtaaaagacagcctgaaagacagctttgacgattccagtgctaacctgttcaagctaggcgcggagaacatcttcctcggtcgcaaagcggcaaccaaagaagaagcgattcgttttgctggcgagcagctggtgaaaggcggttacgttgagccggaatacgttcaggcgatgctggatcgtgaaaaactgaccccgacttatctgggtgagtctatcgcggtgccacacggtacggttgaagcgaaagatcgcgtactgaaaacgggcgtcgtgttctgccagtacccggaaggcgtgcgcttcggtgaagaagaagatgacattgcccgtctggtgattggtattgctgcccgtaacaacgagcacattcaggttatcacagcctgaccaatgcactggatgatgagtccgtcatcgagcgtctggcacacaccaccaagcgtggatgaagtgctggaactgctggcaggtcgtaagtaatcgaatccgacctctccacatggagaaggt

SEQ ID NO: 26116 - DNA, 535 bp, Arabidopsis thaliana columbia
  unsure (1)..(535): unsure at all n locations
nnnnnnnnnnnnnnnnnnnnnnctaaagttagcccccagataatcgccacgccggtagcaacgattttatcgcttccccacaacgtcagtaccaacgcactcacagccagtattaacggcgcgcctgctaaggcagttttaccgaacgtttaagaatgaacgacgaaagcgacgtaccaataaagctggcgataccaaaactcaacagcaccagcgttaagccatccacgccgaatcccgccaggttcatatacaccgggcgaatatacgtgaagaaagcaaactgcccggcgaaagacatgaagatggcgatcatccctgccatcacacccggacgttgtaataagcggaaagtattttgtttctgatgcgagggttcgctggcagtgaaggcaatgatttgataatccagaaaatacacagcacgcccatcaccgccgccgcattaaagacattgcgccaaccgataagctcgcctaaaaaactgcccaacggcgcggcaatcaccagcgcaatagaaacgcgccgaagatca

SEQ ID NO: 26117 - DNA, 791 bp, Arabidopsis thaliana
tgagcattgagtactcctcctcgcagactatccttaaaagcttggcgtctagtcgatatagttgatgaaaggtcaaattctctgaggaattctttcacttcccttcgttcatccagtaatctggagatgctaccccttatatcaaatgaagaagattcaccaagaaggtgcacgattggtctaatttcataaccagcagcagggacatttccaccatcagcttcttgaaaagggtccaatccactgccatcgacattcaggttctcattggcagtaccaggggtagaagcagcagcaattttttccacagaagcaacagcagcatggtcattattactatcagcatcgttcatgtctgtatccgagatgcaatcattgaaactggaaggtaccacaggaaccgcaggattttgctgcctcttgccagctttagcaattggtggtagaagatggaagctgcggagctttgatagagatgccaatatagaggccccatcaacatctgaggccccatcaacatctcctgcccttgtctcgacatgaacccctttcagaggggcaccccgagcttcacatatactcaacgaagaagctctgtcaggagctgctaaattttcatctttaacaggttgaaatatctagaagatggttaagaaatttttaccaaaagacactgattttaaatgaaaaaaacgttataaatcatttagaatggatcgataaattaataactagtgaattaggcgaattaactttcacgcaactccaaaaaggatacataagcatgtttc

SEQ ID NO: 26118 - DNA, 546 bp, Arabidopsis thaliana columbia
tctagtaacgttcgccagtgtgctctaaagacacctgggaacgctgggaaccggtaaccactttattgaaatctgccttgatgagtcggaccaggtgtggattatgctgcactccggttcacgcggaattggtaacgccatcgggacttactttatcgatctggcacaaaaagagatgcaggaaacgcttgagacgttgccgtcgcgtgatctggcgtactttatggaaggtacggaatactttgatgattacctgaaagccgtggcctgggcgcacgtttttgccagccttaaccgcgatgcgatgatggaaaacgtggtaacggcattgcagagcattacgcagaaaacggtcagacagccacaaacgctggcgatggaagagatcaactgtcaccacaactatgtgcaaaaagaacagcactttggtgaagagatctacgtgacgcgtaaaggcgcggtgtctgcgcgtgctggtcaatatggaattattcccggttcgatgggagcaaaaagctttatcgtccgtgggctgggaaatgaaga

SEQ ID NO: 26119 - DNA, 463 bp, Arabidopsis thaliana columbia
tgaaaaattagttctcagacaagcaagaaaactttctgagaatagttcttaccagttcttcttcccaccatgcttcccagctttcagctcctttcacaccaattccacctctgtaaaagagccaatttgtccattctttgaagtcctccacgactctgaaagcataattttattgttgttcaatgagaaacacgttactcaacactcaacatgatataaataagatagcaccacttacttctgccactcaaatccggcagggttgaataggtacggagcaaacagccaagaaacagccaaaaaccagctgctaactgtcagcaggatgtaggaaaccgcaccagcttcatcattgccatacgcaaggtacacaaccaataaaagaataacttccattctagagaaacgaacaagaagtagcatatcaatgaattttcaatcctttactatggctaaacaggta

SEQ ID NO: 26120 - DNA, 633 bp, Arabidopsis thaliana columbia
  unsure (1)..(633): unsure at all n locations
tccaagaataccggtaaacccttcaatactggagatcagtccattttgccattgacatcacatggatgctgcttagcatattgaccgctgacatctttcttcctcttttcatatgtgcagcttagtgaacaagaagatctcattgtgtggatgagaaccgcagcattgccaacatttagaaaactttacggaaagatagagtctgacctcgagatgggtgacaccatacacgttaagctgaacaacaactacaacacgtacagcttcaatggaaagaagaagcttgttttgtcaaccactagttggctgggtgggaagaacgatttccttggcattgcttacctgacagttggcgggatctgtttcattttggccctcgcatttaccatcatgtaccttgtgaaacccaggtacgcaaatccttcaaatgtagttgttgtcgtgatggtaacttctatgcaagacttgtatttcggctaaaccctggttgttttggttgttaactgtcttatatacccaatataataataataaaatattcgtgtacatatagccgcagtgtgttatgctgagtaacaaatgtgtacattgtttcaggcgtcttggagatcagtntacttgtcatggaataga

SEQ ID NO: 26121 - DNA, 550 bp, Arabidopsis thaliana columbia
ttgtttcactagtgtactgattataataaaaaggcataccagtaacctatcttcaaattcaatggtttcaagatgttgggattttgtgttgcctttgctgcaagagtacaaatctttcaagtacattggggaaggcacttcctgttggtaatgagtaagaagagtattagctcatatcattttcgtcaacggatatcgtcatcattataagaaaaaataaagctgtaataaaaatattaattacctcgcgtagaatgcattcagtgtggccgacaaaatcacattcttcacaggaatattcaggatatcgtgaaattaccatagtctcacaaacaccacaatactccaaaaaatcgtcctcccctccgactcttataaatctaagtttatggatgtgataggatttcttgatcacatattcaggtatctcaagacacttggtatgacatttcaaatcacattccacgcataaataatagaatctgtcatagaccacggtttccttgcatattagacatggttgttttctctttcatcagaacacgacgag

SEQ ID NO: 26122 - DNA, 564 bp, Arabidopsis thaliana columbia
aaaacagtaaagcaaaattaaattaagatttaaattagaacaaacagacataataatttatcacttttctcgatattcatttgattacaaaacagaaccttctacttcatagagagtctttcttcttccccaaagtttcctctttagttactcccccattgcttgtgaccaggggaccatttaggacacttggggctgaagtaactatcaacaaccctagagtttaacagctcaatgatcggagcaaacttcacacaccttggtgtcttgtactgattgaccgatgcacccaagcttatcgcataatccatgagcttatcgaaagtccctgactcgaccatcttgatctccaatggtccaatggacttatcactgacccttccttgtctatacacactgttaagtgattcctctatggttaaacagcaatcctcgaagaccgagggaggaattggcgtgttacgttcaagcagagtcccagaataagacatagtggccgggatagatgatgtgcccgatagctagtgtactcggagagtgaagatcacacggaacaaggtgtgt

SEQ ID NO: 26123 - DNA, 499 bp, Arabidopsis thaliana columbia
ataacggtaagtactatcatcctgcactcagggtttattgttgtgactggtactggaggtgcaatttggggatctctttcttaatttgctttttttggtcttgtaaaatatttctgcttcactgatttatgtggggatcctcacaccctagaaatgttaactcgtcatcttgtggattttctgcgctggctagtgttctgtttgataagacatgaagtgaatggtatcagttgttattttctgtgtcttaaggggatgtattttccttactatttgattgctcattcaaatagattcattaatgaacattctgcctgcaacattttgaatgatcctctttacatgccaaaggtatatttttcaatgagatattaggaggatagatatttatttgtgttctcaagcttctgtaatcaggtaacagaatcagatgcagtggatgttgtcgagaatgctattaagcatcatttatcagatgtcacaactaaggcaatggcac

SEQ ID NO: 26124 - DNA, 495 bp, Arabidopsis thaliana columbia
ggtgtgatgcctgagtctatgaatcccactatgagtgtaaatccccaatacaaggaaggacaaaatggtggtggaacaaggagccagttctcatcagctctgtgggaattattggaatcaataccatcaacaccagcctctgcctgtgagggtcctcttaaccagacctttgtgcgtatgtctagcttcagccgcatcaggttcaatggaacgtcagtgactagtagaaaagtcactgtagcaaagaagcgtatcagtaacagaggttttcttctgttatcaattatgggtgctttgtgtgctatcttctgggtgttcaaagccaccgttggagttatgggaagacctctcttgtcgtgacctagactcttgaatcttgattcagcataagttagcctgatccacatctttgattatgtatagagtttgaaagagtttaattcttaacaaaagatttcttttatcctggattctctgatggctttgaaattttgc

SEQ ID NO: 26125 - DNA, 1044 bp, Arabidopsis thaliana
cttcctttcttttcttgtggtgtcatgtctgctgtcttcggataagaaccgaacagattgtgtcttaatctgtggagtagaatatattaaaaaagcataaaccaatagaaccaaagaccaatcctaaaagcctagggatggattctagagcattatccttgactctctgaaacctttacccaactcaattatggacaaagacaaacatccgtattactctggggaagtctttcacttttgacaccttcatgatgattatctttgaaacgtgcagattctactctccgcacatttagctccagtatttgcaactggagcattcattgttccaacatctctttactttttgttaaaggtgagtgattggaccctctaaatataatctacttttggtctattgttataagctgtttaccttattaaacattttcactgttccacgcagaaatttgtggtgaagccatatttgcttaaaagagaaaaacaaaaggccttggagaatatggagaaaacttggggccaggtgattgttacttccgagtttggtagccaagcgagattccttgtaattgtagatgatcttattatgaatatttgtttaaactgtgggttttaggttggggaagcaagggcaagggctgagaaagccagcaattgctacaaaccgtagccacaaggaagaaaaaccgtcaagttgaaacagatgggctcatagtaacgaaagcgttgtatggtgacccaaaagcaatagagagaagaaacgaaggagtggaaggactggattcgggagtcattgacgtgacagtgccgatgaacttccttgtgagtgactcagggcagctcaagctccatgagggagtgaagaaatcagggatcatgggtttttgcgatccctgtcccggccaacctaagcagttatacattgcatacacttaccattctcagccatttgaggtaatagttggtgactatgaagagctgagtataccacaagaaggccagtgagagtatgaaaacggtactctccactttgttgtttttatt

SEQ ID NO: 26126 - DNA, 1061 bp, Arabidopsis thaliana
ccgaagacagcagacatgacaccacaagaaaagaaaggaagaaagtaacactcacgggaacaatcagcttttggctaccacggtgtagctctactttccagaaaataccctacaaacaaagtataagagtaccggaaataagcagattgcataatggctaagatggctccgaaagttttaaagagtagtttaccttgagtcctactgtatacatcattcttactgtactgaactcagaaatttgccttccaccaccgagctcaatctcaagagcattgctgaataagttaaaaaaaaaattccaaagtaaaatgagaacaatgattgcgccacacatgtaaagacaacttaaaaaatgatttctatcctctcgcacatcatacattaggttgctcgggattgtcaataaaacataccttccgattctacccacaatgcgaccatgagatttggatgaaagtttacgagtataacgagctgatgctccgagtccaccagattcaatctagtaatagcaagattagagctagggaaagtaagaaaggtggtcgagtaagaacagtcagaatgcaatttggactcagcctaccttaaagtcaccagcagcagatacattctcgtctctctttttccatccaactgtaattgctgatcgcatacccagtgccagttcaatctggatgaaatgaactattttaaaatcgagaaaactgctttctcgccatcttagaaggtttaatcaaaacaacagagcgaacttacatttccgcttgaagtttctgaaagctgtcgagtccacgtgttggtaagattgatggagccatcactcaaagactttgaaatattgattgtggcagttgaatgtatggttaactgactgccccaacaagaaacccataagagtcacataaaccgaaaccataaaagatgcccagaaataactggaaaaactcatgagcctaccgtgttgtctgcactccaataagcgactgcaaacccgttgaagcgacaaactctatggatgacactggagaaatctgacgtctcagtatggcagtagc

SEQ ID NO: 26127 - DNA, 510 bp, Arabidopsis thaliana columbia
  unsure (1)..(510): unsure at all n locations
tnnnnnnnnnnnnnnnnnnnnnnnctaaagttcgacgcaatgaatgtccctgacaagacccaaaggagctggaaggcgccgaatggtatgcccaaggccacggtcctgagactgtcatctgtgagacctttgatgataagcttgctgaagttggcgagcccgcgttgatggtttcgtttagcagcatgaataggaacaagatccagacttgcgggtcgagcagggcttcacgaatttggtaccatttgatctggtggctaagaattccagtgcgcgcgagcttcctctggcaacgagaagtgctttctcttcgattgtgaaacgcttcgcagagagaatatcgtcaggcaagaaaaggagcaagacaaggccccatgcaacggtgataccaccgaggatgaggaagatggcgcgccagacggcgatggtcttgatttggccaatgcgtaagtcaggattccgccgactatagcgcccatttccgtacaggagtagaagatccagcgcgga

SEQ ID NO: 26128 - DNA, 559 bp, Arabidopsis thaliana columbia
  unsure (1)..(559): unsure at all n locations
nnnnnnnnnnnnnnnnnnnnnnctaaagagccatcaacagtccttattaatcgagaaatccttctcacgcaatttttctggccatcagatagatggccggttcctgcacaatttcatccaacagatgaatgaattgaatgctacgcgcctgccacacagacgtcgcgtcatccgccagtggcgcgaatgcccgggtcaacagggcggtgtggctggcgtcaataacaatctcaccaaaagtcatcacccccagcatcttacgtcgggcttgctcctcttcgaccagtgcaagccaatcttcgtattccgtcagtgggcagcggaaggcgacattcagacaatcaatcacgccaacgtgatggccgatagctagcgagtaatacattacctgagagctgtgttccggcatctcgtcgctactggcgacaaacttttttcgcagcgtccagaaaacaatttccccgcactcttcagtcatgtaacccccggagtacgcgaaagagttgctgaacgatactattgagacgtggatcgtcggcatcgcgcaaccaaggtgtta

SEQ ID NO: 26129 - DNA, 470 bp, Arabidopsis thaliana columbia
cttctcgtgttcgccgcaaatttagatgctaagatcgttgctcccagatttgtgttgtccattgatccgccttcctcgtcacttccatagtaatactctctagtttcttcgtcttcttcattgtaacctgtttcatccgggtaatagtatccgctactctcgtgaaggctgagctctttcgcaagctttcttcgcttgtatcttctccatgcagattggacaaaacatgctccccatgctctccattgatgtgagtagtacctgacagcgtgttgaagcttttcgctttgaagacgtttgacctgatgagcaacacacttaagactctctgcgcttaacgcaaaggcttctacttcagacagggcacggacgcttcgtgttgaagacggaagactgagtgtagagtttggcattaaggcccatgtaagacagtcttcccacagaaatcgccaggtcgtagagtagtggag

SEQ ID NO: 26130 - DNA, 607 bp, Arabidopsis thaliana
ctaaagattaacaccataattcgcttcatgttgttgcaggcagggtccggcatcctcaccagcaccttccaaccggtggtggcgaccctctccgaagtctacggcattaacggcgcaattaccgatacctacgcttcaatgatggcaaccatcgaccgcatgggcgatgcctatagctgggtgggttacgccgtattgttagcgctggcctgaacatctgttacgtgctgttgcgtcgcattaccggcattcgcacaatcatgttgaccggccacatcatgttccagcaggccgggttgattgccgttacgctgtttatcttcggctactccatgtggaccaccattatctgtaccgcgattctggtttcgctctactggggcatcacttccaacatgatgtacaagccgactcaggaagtgacggatggctgtggtttctccatcggtcaccagcagcagtttgcatcatggattgcctataaagtcgcgccgttcctcggcaaaaaagaggagagcgttgaagacctcaaattgccgggctggctgaacattttccacgacaacatcgtctccacggcgattgtgatgaccatcttctttggtgc

SEQ ID NO: 26131 - DNA, 1006 bp, Arabidopsis thaliana columbia
ttccccatcaaggttcagcaaaaccctaaatctcaaaaccatttgcccaaattggttttcgccattaaacttgcaatctttgcagtgctattacatttgtatagctacagacaaaatctgtctccgactatactattaggtctctattttgtgcatctctacttagagattgagattatattaacgttttgttaaagttgttgtttttatctctcttggctgcgatcttgagccacagtccaataaaccgtacttagccacatctctacaagacttctggggtcgccggtggaatctcatggttccggcgattctccggccagccgtttacgcaccaatgcggcgagtctctgaacgcaaaatgagttccggttgggctctgtttccggggattttggcagcgtttatcgtctccggtttggttcacgaattgctcttcttctatttgatacgtgagatgcctacaggagaagttactctgttctttgtgttacatggcgtttgtactgctgtagaattggcggtgaagaagaaaacgacggtagcacagcggtggcggttgagtccgggggtgtcgcgggttctcacgggtggggtttgtgtttgtgactggtggttggttgtttacacctcagcttaaaaggagcggggtgatggagagattcacatctgaagctgtgttgctcgttgagttcattaagcgataagttattttatttacgttgttggggatattttataacgagtgttaaatgagcacgagttaacgttattgagtccggttgagcatcaaagtccataatggtcaactacttatcttgaaatgaatcgaacttgtcttgttgaagatgtcggcaagttggaattagtagaaactctttaagatgctgccagcatgtctcttggtctcttcatgccgtttctttctttcttatcaaaccctaaaaaaactgacttgcttcagttccaagttcgttgtacatgacgatttgtttttacttggaac

SEQ ID NO: 26132 - DNA, 534 bp, Arabidopsis thaliana columbia
tggttaacagaaaaggcagccaaggtaccatagacatcactctctttgcagcaaaatcctctgtttttgttttagagaaaaaccaatgatctaattaggattctactgtttcaaactctaacttttgcgtttgcattacatataaatagttgagaaggaagattggttaccagaggggtttgaagagaagaccaagggaaaaggattgataatccgagggtgggcgccacaagtgctgatacttgagcacaaagcaattggcggatttttgacgcattgtggatggaactcgttattagaaggggtggcagcgggcctgccaatggtgacatggcccgtgggagccgagcagttctacaacgagaaattggtgacacaagtgttgaaaacaggagtgagtgtgggagtgaagaagatgatgcaagtagttggagacttcattagcagagagaaagtggagggagcggtgagggaagtgatggttggagaagagaggaggaaacgggccaaggagttagcagaaatggcgaaaaa

SEQ ID NO: 26133 - DNA, 825 bp, Arabidopsis thaliana
gagaacaatgacgagcgttttcgacgaacataaaccctccgatgactctcacgagtccaagatcgtcatcaatggtaatgtatctctatgttccttcggtttatttcggtttatcccggttttgtttcgattctttaaatcttctagtcgtttatggttggttggtttaagagtgtgtgtttggattgaattttaacgtgcaggagaagaagaggtgttggaggaggagaatgataatccgattgaagaagtccggttaacggtaccgataaccgacgatccaacactaccggtgctaacgtttcgaacatggactcttggacttttctcttgcatattgcttgccttcgtgaaccagttctttggtttccggtcgaaccagctttgggtatcttcagttgcggcacagatcgtgacccttccgctagggaaactcatggcaaagacgctaccgacaaagaaatttgggtttcccgggacgaattggtcgtggtcttttaaccctggtccgttcaatatgaaggaacatgttcttattacaatatttgctaacaccggagctggtggagtttacgccaccagtattattaccattgttaaagcgttttataatcgtcaacttaatgtcgccgccgccatgttgctcactcaaaccactcaggtatatagtttttacatgtcttaagttttattgtctttttgtttttataatgggtggatataacagtagctacacaaaaaaaaaaagctattatcttcttgattacgttcttcaatctttatgattactgattattatttgtctcgcatgttatacatttacaa

SEQ ID NO: 26134 - DNA, 534 bp, Arabidopsis thaliana columbia
cgctctctcccttcttctccccaaccagcaacgctgctctactcttattcacgcgccgttcatggcttctccgctcgtctctcccctatccaaaccgccgccctccgccgtcatccttcagtcatctccgttatacctgatcaagcgcgtgagatccacacaactcacacgcctgccttcctcggtttctcccaaaactctggactctggagcaactcaaattacggggaagacgtgatcgtcggcgttttagatactggaatctggccggaacatccaagtttctcggattcaggtctcggtccaattccatctacctggaaaggcgagtgcgagatcggacctgattttcctgcctcatcttgcaatcggaagcttatcggagctcgagcgttttacaggggatatttaacgcaacggaatggaacaaaaaagcatgcagccaaggaatcgagatcgccgcgtgatacagaaggtcatggcacgcacacggcatctacggcagctggatcggtggttgctacgcgagtttgt

SEQ ID NO: 26135 - DNA, 362 bp, Arabidopsis thaliana columbia
tgagtcgttgttgttgtgggaatagattgtttggttgatgaatcaaagagcttgttctcctccggcaacgacgacggtaatgacttcttcttagaccttcgtttgtagaagcagagagctaagattgagagtaagagaagcaaaccagctccgattccaattccgatgtagatccatttgtgagaagaagaagatcccggaggaccaactggcgtttgaggcggcgtacaacaacgggtggaggaggaggcgacggagatataacgattttggtaggttcagttgtgagaggaactagaaccggtgtgaagaagaagatattgtctgatgtaagctcgttaccttcggttatggcggcggat

SEQ ID NO: 26136 - DNA, 419 bp, Arabidopsis thaliana
ctctagtaacggggccagtgtgctctaaaggtagacgggcgtcacgcaaatggcggttcagataaataaaacgataaattacctgcgtgcatatcgctgttggcgataagtcgcccaaatgcccagatcacttctgtttgcgccacgctctggtgagtgacaagttgttgctcacacaaacggcgcattgcctgcggccacgatcccggagaagagatacactcactctgcaccgcctccagcgacacaataggcaagcgaccatcgttacctttgtggtcaaagcgttccgcttcgaggaatacctgcctgttacttgttacaagcaccgttgactcgatggcgtggatcccaccgtcacgcatggatttgcgcggcaatagattcagcaattagcaggtcaccccaacgttggctga

SEQ ID NO: 26137 - DNA, 542 bp, Arabidopsis thaliana
  unsure (1)..(542): unsure at all n locations
nnnnnnnnnnnnnnnnnnnnnnnctaaagctccatgcaagatcgaacgtcgcagtcgctaacggcagggattcgatatctcccgccagataatggtctgcggcatccttctggcgtgcctgaacaagcattggcggcgagagatctaaggccgtcacctgcgcgtgacgttcccgccagtggcgctcatccagccaggtccacaacccgcgtccagtacgtgggtgtatttacgctgtggaagcattgccagtaaggcgtcacgactctggcgctgtagatctgcatgttgctcatagtgtgcggctgcccgaccaaatgccgctgcaatggcttgtttattaaccgttgccaatgaatactgcttctaatttcggttagtccaaacttaacggtatttctcttttctttttcccggtttaactgaattggtcaattgatgtaactcttcccccagggatagtaaacaagatgattaagcatgacgcaaaatagaacagacaccttttgaaaaatcatgttaagccaaattgataacttagt

SEQ ID NO: 26138 - DNA, 595 bp, Arabidopsis thaliana
  unsure (1)..(595): unsure at all n locations
agtgtgctctaaagctttggcaccaggtaagtgccactaccgtgcggcggaccaccagcccccacgctaccagcaggtcaatggctttacggatggtcatccgcgataccgcaaactcttccgccagctttttttcaccgggaagaaggctgtttagcgtgaaatctgcggagttaagtcgaattcttaaccgctccgcaatgcttttgtagatcatctctagatctcttttttgcctgcaagcccgggtaatgcgcacacaagttctgcttaatcgattgaaaaaacatcttttttttaaagatgtgttcgatgctgtgtacctgtgctcacagaggtctactttttcgcgaaaacgtagatctctaccgcccaacgaaaagcatgaaagcgatcacgaatcccattgggtcgtcatgttctgccgatcgcatcttcctatcctcgctccaggcctgccgcataaccaatcaggcttcctacttacagaattgagaaaagaggatgtggaaatgctcagtcaaattcaacgctttggcggcgcgatgttcacgccagtgntgctgtttccttcgccgggattgtggtgggcttg

SEQ ID NO: 26139 - DNA, 460 bp, Arabidopsis thaliana
  unsure (1)..(460): unsure at all n locations
tnnnnnnnnnnnnnnnnnnnnnnnctaaaggaagtagcccgggaagcccatctggttgataacctgaagttcagtctccagacgttcgtcatattccgggcggcgcttaagacgttcttcctcatcagggaataaaaaggccagacgctcttccaggccctcttttgcacgcttgaccagataatcttcggtgctcatgtccccggtcgggaactgcggcaggaagtattcaccaagacgcacggttacgttacagcgtttggcgatctcaacggtgttggcaagggcttcggggatgtcggcaaacagcgcacacatctcctcttcgctacgcatatattgctgcggcgaatagttacgcgggcgtttaggatcgtcgagggtaaagccgtcgtggatcgcgaagcggatttcgtgtgcgtcaaagtcgctgctgtcgataaagcgcacgtcgttggtc

SEQ ID NO: 26140 - DNA, 573 bp, Arabidopsis thaliana
tagcagagaacaacaatgtttgtctactctttggcagacactgaaagattgtgcgtaactcgtcttggaaaccaacatcaagaactctatccgcctcgtccagcactaagaactaatcaaacaaacacaaagtaaagctaaagaatcaattaaaaagcagctactttgatagctcagaaatttgtgaatgttctttaccttggttctagagaaaactggaggaacatcaggattgttttcaagcaaaaccttgattcttccaggagtagtaataacgatatgaggtcgtgaaaccaagctcatagtttgcgtcaacatatccattcctcccacaattacagagcaacgcaaattcaaacacgaacccaaagccttaaactgctcagcgagctggaacgctagctctctagtcggcgtcactacaagcgcgaagactccataaggatcttcagcaaggcggtgaagtataggtagagcaaacgcagcagttttaccactaccagtctgagcaagcctaaaacgtctcgtcaggctaatatcttcggcacgcagtgagtttgaactggagtgggt

SEQ ID NO: 26141 - DNA, 529 bp, Arabidopsis thaliana columbia
caagacttgaaccacgtaatccacccttatccttatagaagctcataaataccactaaagggacagacgacgcttaaccagtagttgtccaataatttacgctcataaatacccttatttttataccttagatttctctaataataactcagacattgtaacaaagaggtgtataatcttaatccttcatacactggagggtactgtctaactattttaaaatgatctaaaatgatttcatcgctaattcaacgcctagaaaaggcaactaatatcagcatcgacatggagacaataatcttgaaacctgatttgtcccacaagttttggttgctagaaagatcagcttcatgctgtttttttgcagccaattgctcgttgagtacttcttgtattgccatatcgtttcgctctcccatctagcatcgcacagaaagaacagctcaaattggtactgtattcataaaattactatccctagtaaaagcaagtgagtttaccttttgaagttttcgagtttggatgcgtg

SEQ ID NO: 26142 - DNA, 392 bp, Arabidopsis thaliana columbia
atctcggttttgtgcgggttaggttattgggtacaaggatcaagatgtttcccatggcttgcacttaacttccatatggttcatagcctcgcactccaaccatcgacgcttcagcttgtgcaatactcttgcagtcttcccatggtggctaaacctctctacggtgtgctctcagatgttctttacattggaagtggtcgtagagttccttacatcgccattggaggttagtttttccaaagtctctctttgtgccagctccaatgccttgaacatgagatttttagaaccaaatttaggaaatgaagaagcttgctgattgtggcgattctgtgtcagtgtttctgcaggtgttagcatggggttcaatggggatatttcaggagctagag

SEQ ID NO: 26143 - DNA, 442 bp, Arabidopsis thaliana columbia
cttcctcaacagggatgttgatagaaaccaagaaatccctctcttcatcagcataaagatcaccaagatcaaccaaccctgagtggccatcaccagttacaaggctagagtaactcccagcttttatcgagctaagtcgaacatttgggctcacaccttcaatttctactcgtagctcctgcactgcaacgcttaaaagtccaccaatgcactgtgcaagagcatcctggatcacagactcactttcaatgaaagaaaaggttccaccagagacttcagagactgagtgcatcactgaagcatcatgatctgatccaaaaccaaaagagtgaacagaaatctgaggaagcatcaccttgtaacttggatcaggatggttcgtagtatatgtatctcgcccgtcagacaaaaggataatgctggcaacagaatttctttctag

SEQ ID NO: 26144 - DNA, 453 bp, Arabidopsis thaliana
taacgtccgccagtgtgctctaaagacgataagtagcgcaccggaaagggcgctagtcacctgatttggcactcctgccatttgcaaaccttgttgcaaatatcccactaataaaaccgcaatggcgtgccgataatggaaccggaaccaccataaatattggccccgccaagcaccacggcggtgatggccggcaatcagaaacgacgcaccgagatcggaacgtgctgaaccaaaatacgataccagcagcacagcggcgaccgcagacgctagccccgtcatggcatagagcgcacataaggtacggttaactggaatcgcgctataaagtccacgcggcgtctttgccaatcaaaaacacattacgtccggcatgggttttatgcagccagagccagaaaacgaggagacatatcaggaagataatcagcggaacggggagtcccagca

SEQ ID NO: 26145 - DNA, 542 bp, Arabidopsis thaliana
  unsure (1)..(542): unsure at all n locations
nnnnnnnnnnnnnnnnnnnnctaaagaaggcgtttaccgtcatccggcaattctctgctcctgatgagggcgctaaatgccgcgtggcctggaattattgattgctcaaaccattttgcaaggcttcgatgctcagtatggtcgattcctcgaagtgacctccggtgcgcacgagcgtttcgaacaggccgactggcatgctgtccagcaggcgatgaaaaaccgtatccatctttacgatcatcacgttggtctggtcgtggagcaactgcgctgcattactaacggccaaagtacggacgcggcatttttactacgtgttaaagagcattacacccggctgttgccganttacccgcgcttcgagattgcggagagcttttttaactccgtgtactgtcggttatttgaccaccgctcgcttactcccgagcggctttttatctttagctctcagccagagcgccgctttcgtaccattccccgcccgctggcgaaagactttcaccccgatcacggctgggaatctctactgatgcgcg

SEQ ID NO: 26146 - DNA, 463 bp, Arabidopsis thaliana columbia
  unsure (1)..(463): unsure at all n locations
nnnnnnnnnnnnctaaagcgcgctgtttgtcattaaggctgtcgagcaggtaagaaacgtccattggcaccgcgcgtaaaaataggttgggcggagaagcgcaacgccctccgccaaaaagctgggtatatatacagatttgctgattatatcagcgaggtcagagatgccaaccgggaaatttccagatgcggcagtaaacggctgtcccaggtttgcatcagatcgccattttccggtctgatccaacaagcctgcattccgctgcgaattgccccacccacgtcagtggtgagatcgtccccaacatgtaagatctcgccgatcggcacgttgagtttttccgcagccaaaaagtacatatcgctgaacggttttgagcgcccgtgcgggccagcgcgcacgacaaactcaaaataatcccccaaaccaaacagctccggctgggcgttaccgttggtga

SEQ ID NO: 26147 - DNA, 359 bp, Arabidopsis thaliana columbia
ggacgtcgcagggaaaacccaccagttgcatcatcaccagaagctctaatatcatcaatataacgacgcagaagagattcagggaaaactttcctttcaagccacaacttcaggacctaaaaaaacaaagaggtcactgactccagcctacaaaactgtaaggataacatagaaacaagcaaatagtttaaataccttcagacatttacgacggttatcactagcaccagtccctggaggagcagcggcacctaaaagacgtggcaaagcagcttgcacagtaggaacgtaagaagcaccagcaatacctacaaaattcacaagcactggaaattatttaaatctctcctctcctctcc

SEQ ID NO: 26148 - DNA, 936 bp, Arabidopsis thaliana
  unsure (1)..(936): unsure at all n locations
ctaaagaccaacaacgaactgtttaccagcctgaacgtcggcacgatgctgaactgaacagtgctctgaaacaggtcagcggtacgcaggcgaccacggtattccgcgaagcagcgtgttaagcaaccgctttagtatgctggcagatgccgcgccgaaaagtgggtaacggtctggcgttcaacgttgtcgcgaaaggcgatccgcgtgccgagttaggtaataataccgaatacgacatgctggcattgcgtaaaactatcgacctgagcgaaaccagacgatgagtctggagtacggtatcgctcgtctcgatggtgatggtgcgcagaaagcgggtgataatggcgttacaggcggttatagccagttttttggcctgaaacatcagatgtcgttcgataacggcatgaactggaataacgccttgcgttacgacgttcacaaccttgacagcagccgctcgattgcatttggcaacacgaacaaaacggctgataccgacgtgaaacagcagtacctggagttccgcagcgaaggggcgaagactttcgaaccgagcgaaggactgaaggttacgccatatgcgggtgtaaaactgcgtcacacactggaaggtggctatcaggagcgcaatgccggagactttaacctgaatatgaacagtggcagcgaaacggcggtggacagcatcgtcgggctgaaactggactacgcaggtaaagacggctggagcgctacgcntacgctggaaggcgggccgaacctgagctacgcgaagagccagcgtacggcaagcctggcaggcgcaggcagtcagcactttaacgtcgatgacggtcagaagggcggcggcatcaatagcctgacaagcgtcggcgtgaagtacagcagcaaagaaagttcgctgaatctggatgcgtcaactctttagag

SEQ ID NO: 26149 - DNA, 429 bp, Arabidopsis thaliana columbia
aatccaattatgaaacaataggttctttttaccaaattcataactaaaacctaactaaattcaacatcaaacaaggaaatggttaaggttatgataaaataatgatcttactccattgcaatgtagacgtttgcattgtcctcaaatgcatcatagaattgtaccagattcttatgtccagataaagcctgtagaattttcacttcccttctcacatcttctatagcaattgcagttgtcatctgccaaaaaagaatcaaaacacattcaattctatcagctaacactacaatggagagtatgcaatcatcaagatcaagaaactaaactcaagttttgttaccttcgattttgggatgattttgacagcaaccacttgacctttgagctctcctttcttgaacttagcagagcaagtgtacccaaaaa

SEQ ID NO: 26150 - DNA, 503 bp, Arabidopsis thaliana columbia
acacagatactttcagcttataagatgcgagtccaaaagtaggcaacggtagctttgtggatggttgtgaatcactacaacccatagcacctgctccaatacatacacaacactgagaaagagatcacaagtacgaggacataagaggatattgtgttccattacgtcatcgggtgcttactttgaggaggtgctgttgagagagagtgaaaagttagaaagcaggcatcaagattttgtagtgttggaccaaccggtattctgtatattggatacctacacaccaacaaattcacaactcaatattttcaaatccatttccacatatattccaaaatgtaacgatcccaagagtcaagactcaggaaggttcacatgaaacataccatgacacagagacccaacttgaaggaagaagatcacagctccggtatgtcattagctcaggaactcttgacgcgagatcagagatatggtgtgtatgaaaactttattagaaaata

SEQ ID NO: 26151 - DNA, 584 bp, Arabidopsis thaliana columbia
  unsure (1)..(584): unsure at all n locations
caatgtgtgttgtagaatcaaacaaaaagacatttacctagcagcttcgacctcggtgtcgaacaaacccaaataaacatacctattttataagattcaagaaacaaaaactcaaagttaaaataacaaactaaaaatgaagttttcgagtgaatataaaatgagagaaattatactttttgcctaagaattgacccattcgagcttcccaacgaccacacttatgcaaagtgacacctctatacttcgaacttcctcgagggaagcctgtgctttgtcggcgaagtacgtgtacgaactcttccttggttaaattagtcatctataaaattcaatttcaatattaatctcccaaacctttaaaaatcgttaataaaaaccaatatagtttataatttatatttacctgtttcaagtcatcatcataatcgtcgatgttgaaattgatatccgcttctactccacggaatttaatagcagctctatcatatgctctattaaataaaacaanattanaattaatttttataaattgcttccggtattttttaaaaaataaataaatacaactcaatatagagaga

SEQ ID NO: 26152 - DNA, 592 bp, Arabidopsis thaliana columbia
caccgtccaagcttttgacccataacggttcttcactctgagcaagcttcactaactcatccatagcagttaaagccagctccagcaaaactgacttctgatcaatcccattaatcaccgtcgactgctgctgctgcggaggtaagcaaccaccaccaccgccgaaatcaggagggaaagcgaaatgtccaccgttgttgttggtgccgacagcgagttctaaggaggagttgtagtggtgattatggtggtggccaaggaacttaccggtgaggttacagacacgatcaagctcgtcttttaaacgagcgttttcgatacggagatgatgttcttcaagagagacatcaccaagcatggcaggtccaccacaattggtgcagattggattcctcattgcttcacgaatagacatgttctcagctcttaacttatcgttctcttgtctcaataacgcgttctcatgcctctctaattgagtctgcgccacaatatgattttattacaaaagaattcattttttgggattaaagatgtgatttaactccacataccttcatctgagtgcgacgattctggaacagaacttgac

SEQ ID NO: 26153 - DNA, 450 bp, Arabidopsis thaliana columbia
tcgagttaagtgtgtttataccagaaaaatcgatataagaactaactcgaacacatgtttgcttgcttattatgaactctaacccaaatccgaatgaaacattcatacacatgcttgattattatggagtctcttatattcttatacaaaaacatccacatttaaagactacattttatggttttttcatctacataacttaaatcacgtttaaattcctaatctcattaacaatgagaatgaatatcatattggaagattagtttgttagttaacttacgaaggccaccggaaggagctggaggagggccaactttgatcgaaatagcatcggcgaggacagcctgaacaaacgagcctacagctaaaccagcagcaacaagcccaatcacggaccggcgagaagtctctcactctgctgagctctgacgacaagtctagacctttgag

SEQ ID NO: 26154 - DNA, 448 bp, Arabidopsis thaliana
tgctaagtacctcggcttcaccagacacctccatctccgaaactcctggtgctttttctacgatcaagttcccgatgtcttcgagtaaatggtatatcacacggtgatggaatacctaataagagattaccatcggttacaatgttaaacgctatctccatgatatgaatgtgaacgccaacgcacaagttggcaatggcaattatcaaagctatatacgtatgaattctttataacagaacggcataccttgacgctgccttgagccgcagaaagattaccagtacttccacccttaacgttaaacccaacaatacacgcaccgcaaacttgtgccaagtccaaatcagagtgagatattgctcccactccgctatgaacaatgttcacagacagctatccacaatatagacactaggcacattcacataacaataagccacaatca

SEQ ID NO: 26155 - DNA, 564 bp, Arabidopsis thaliana
gcggctattacatgcacagtttgggaaagtagagtaggccttaacctcatgccaaatactttagatggatttaaggtgttgctattagcttgttagattttccaggaaagtgatcttgtgtatctatgataccttcgaaataatttacctgtttgcccatatgcaaagcaagtggctttgatgcgctgaaaaattagggggactacaggctccacagtctcacgatatacctacagaaatttgggacataagcggcacaatggttactgattattttgaaaagaaggcttcctccaaagttatagtcagtccagtaacttgcaaacaaaacttacctcatcatttgatacttcctcatctagcacggcatcaaacacaaattcatgcttttcaacataagctgttaagtcgacctgtaataatgtaataatagatcagtcttagtgtctttccacgttgataactcagacgattgggaatgcatgaatccaagccatcagagactgaccttagagtttagtttcatgaactgttaagcaattggcatgggtgtcaacaatatct

SEQ ID NO: 26156 - DNA, 480 bp, Arabidopsis thaliana columbia
ctcttcaaggattaatgaacaagaacaaatttcataaaactccaagtcaaagctcggaccaccattatgtgcacaatgaatttcgagccgtcagtggatttacgaagaatacgcgtcggaaatattatacgtgtaatcctggatcaactggatcggtaaacaaatgacattggttatgatagacgcagaaagctctcagcttctggatactcactccaagctattcgatattactcgaggaattgctctcaaaccaagaacgtgaaaaaaccccgacaagaattcaatagactgtgtaagaactgaccattcggatcgagaaaaccatataagaaatcagtaaggtatctcctggccatcccaagcaaagaacttgccgctgtcttgtctcttagtattgcttgatgatgtgcagtaacttctgcacagagtactctcttgtgaaaagtttgccgtcaggaacattcctttgaaacggcc

SEQ ID NO: 26157 - DNA, 507 bp, Arabidopsis thaliana columbia
tgtgctctaaagtgacccgctatgtgatggcagaaaccattcgtcagcgccatgttttcccgatgagtagtcagtttcatgttggcattaacgtcgcacccagccattttcgccgtggtgtgctgataaaagatctcaatcagtactggtttagcgctcacccgattcagcaactgatcctcgaaatcaccgaacgcgatgccttactggatgttgattatcggattgcccgcgagctgcatcgtaaaaacgtcaaactggcgattgatgacttcggcaccggcaacagctcgttttcctggcttgaaacattacgtcctgacgtgctgaaaattgataagtcatttaccgcagctataggttctgacgcggttaactcgacggtgaccgatatcatcatcgcgctggggcaaagactgaatattgaactggtggcggagggcgtggaaaccgaagaacaggcgaagtatttgcgccgtcatggcgtgcatattttgcaagggtatt

SEQ ID NO: 26158 - DNA, 549 bp, Arabidopsis thaliana columbia
gacatacaacaccggtgagcctcccagcagatcgcatttggacacagcatcaatccacaggtaatccttaaacctctctttcatctctttatatatttgaaactgcaatgccctcacaacaaacatataactgaatcaggatatatcagacccaattattcggcaaatcagataacggtgcacattcttgtgctttcctttgacacatctgatgcaacgaaatccataaggatttgtttcttactatatacctgatcagaaggagaagtcccacattctcccgttagatcatgaacatatagaaccgcggttggaagatgagtgagtacagcaagagttaacttctctagattattcctatcctctgtaattaccaaataaaaaaatacaagaatcaagacttaatcaaatatcatatagttattcatccacatgagagttcgtagcaactagactttaccatcgcatctcctaagaaggccaggggtgtctgtaactgcaatgcgtttctggatgattcaataatctatatcatgaggaaagtgatta

SEQ ID NO: 26159 - DNA, 609 bp, Arabidopsis thaliana columbia
ccatacctacatccaaaaacgttttaaagcagataaagcttattatcagttcaaagctcaatatgttgagagacagtgaaagccagatatatttatacattctttcattgagctgccaagcaggtatgacaggaatggattggtttttagtctcatcactaaaaacttgactccaagttttcgcctgttcgctttcatcgtgcaagatgatcggtaccttcttacgacggtgttgaatcatagcaagcattgcagtcatctgagcacgaatcaaagaagatgtaaagataacatcaacaggaatgttactaatcctcttccctgcttcaatagcttcttcaacacctttctcagtcaatggcacatcaacacaaccagtaaaaagattcttctcgttccataaagattctccatgcctaatcaatatcaaagctgcttcatctaaaccatcaaaacacacaaacttgtatttagataaataatcattaaccaaagtgagatttgaggaattaaaaaaaacagagcatatacttacttgatttcttttgagaattgtcagggattgtcttggaaggagacaagagagtgttgtcataagaacctgatgat

SEQ ID NO: 26160 - DNA, 569 bp, Arabidopsis thaliana columbia
tgccacagttggatgatggacagtttcagacatttagagagttgcttgaagatgatccaaccaggtatgttccttgactcaatcacaaccttggttgacaacagaaaagctggatttgaaaatctgtattccttaatgcagagaatacacaatttgcacgggtcacaaactgactaatggccacttcttggacattgctacgaagcagacatgggtcacaacagaggtaacatttggaaaaaaatatatatttcgtggctgcattgacttggataataatttggttttacatgacttatttcactatatgatacagcatatgcagctgataacaagcatgttggtaaggcgtcgtgggaaagcgtataaggagggttgccatcattgatacatggtttgcaatgcttctgtcaacccacaatgatgatttcatgaaatgcgagaacaaggcaaactacgactgggggtcatgtgtgaaggcgtatgtaacaggaaaatctactgggattcatatgaagtcagaatttctgaaacatgtcgatgttgctacgcccaatgaactggggatg

SEQ ID NO: 26161 - DNA, 500 bp, Arabidopsis thaliana columbia
atcagagagcctcaaaatctttgagtgttttgcgtcgtcggttttaaacaaaaaggttcaataactttttctctcctttgtttcttttttgtttattatctcctctcatcccattttcccaacacgacgtcgttacagattccgtcgaatggacttcccggacgatcacccttaaccaccttacaaaacgacgacggaggaagaaaaggaaccggtacagccggagcggttagggttaaaccgtggttcacttggagatcaagatccgaatcggacttcaatcgttttcggttaaccagagagtctttcatctccgtcgtggatctggaggtggagaagcgacaatggtgggtttggtttcttgaaacgtcttgatgccaaatctctgaagactcatcacaggagatcatcaacgacggagattcaagaagatctgatatcggtcgtaaagttccgccgcgaagaacagtctcaaccgccgcttggcatacgtgccagtt

SEQ ID NO: 26162 - DNA, 624 bp, Arabidopsis thaliana columbia
ttatgcagctgcttcaaaaggtgcaaaggtcttatcttctaacaaggaagcaaaaggagcttcaagcatcatatgccgggacaaagacaagtatctccgaaacccgtgttctactgaagggaagttcgttgtcatagaactttcagaagaaacgttggtgaacacaatcaagattgcaaatttcgagcattactcttccaatctgaaggattttgagattttggggaccttggtttacccaactgatacgtgggttcatctagggaatttcacggctttaaacatgaagcacgagcagaactttacatttgcagatcccaaatgggtgagatatctaaagctaaacttgctaagccattacggttcagaattctactgcaccttgagtttactagaagtctatggagtggacgctgtggagcgaatgctggaggatttgatatctatccaagacaagaacatattgaaactccaagaaggagacactgagcagaaagagaagaagacaatgcaagcaaaagagtccttcgaaagcgatgaagacaagagtaaacagaaggagaaggacaagaagcctcacagagaatgcggttgtgaaagatgaagtacacttgagaaaagaaa

SEQ ID NO: 26163 - DNA, 556 bp, Arabidopsis thaliana columbia
ctgtctttctcccccaactcgcgaacaaagcaaaccctagatcatccatcggcgagtgagacggcagctcctcgtcggtaattccttccaccggcggcgaccactcaccctcagatctctcaatcccactcatctctgtaacattctgtacgctttctctctctctttcttcgcttttgtgatctattacggctcggtctctgtgcctcccagctctattttggagcactgcttcgtctctgtgtttatttggctcctttgtgtgtttctctatctctgcttttcttttgtattgctctgtttccgattttatatccatatgtctctggttatttggttatatctatgtgtgattctttgttcttttttccattgaattcaatagctgactaagatctctgccttttatcttcaatagttgctcaatcttttcgctttcgtaacataatttagtttcttgttgatgtttttgatatctaccaatctcttttcaatttatgtctatatgttgctaaatatcttgttcaatgactgatttcttaaactcagggtggaa

SEQ ID NO: 26164 - DNA, 568 bp, Arabidopsis thaliana columbia
ttcggtgaaagtttcttcacttcctcaggtgtgtagatgaatatcttcctcaccattccacagaactcactgcagcacaaaagagaagaccaaaatgatcatcaacggtaaagcaaaaggacacattacagcagatgatgctttgcaattttaaccactgctttatttgttgacaccaaacaaaatttagagtattagacagcaaatgcacttacttccatggatcatcaccaaccatcatcatgtcatcttcatcatcggtgtaaacgacttgccattttttggtagattctaagagttcacccttgatatcaaacatctcttccagcttcttgaacagatcttcataacactctgaccttgtcaaatcaatagctctgcctactgcactgccttgcatgtgcacctaaatcaaattgccaaaaacattgcgttttagtcaaaagcaagccgcagacacggtccaccaatttaagaccaatattggagttgtgacaaaaaaaattgatcttcaaagaaagagcgagcgatacaagaggctaatagtcacacctttgtgcagctacgt

SEQ ID NO: 26165 - DNA, 558 bp, Arabidopsis thaliana columbia
catcctttggtcatcacgtagctttggctactgttccaatacgagtaacgaaacctccacatcttgccgtttttgtcttggaaatccaacactgtgccgttttgattgtcctctaaagggaagaagttctctgcatgttgctttggaatcacgagccggtttagtttaccgacgtcacttggtgtcaacactttgtcgaacatgtgctctctcctctccgagctgtagaagtaattggtgtggtcggaactgctagctctgatctcggcgagttcttggtcaagattcattgttgagatattcatcaaaagtatcaagctgtttatatatggggtcttgagaagattgatgacccaatttcaagatctttcaaaagtatccaacttataggttcttgaaaagaagatggaccaattcaagatctttcaaaaagtattcaactttatttttatggatctgaatgagtgattcttgacaagatccaatacaaaatccttcaacatacatgaaataattttattagaaatcaaataaaaatcatcaccccaatactaagga

SEQ ID NO: 26166 - DNA, 615 bp, Arabidopsis thaliana columbia
gagcataaaccattcttagtttagaaatgtcaacatggtatcagatctcatagaagtaagatccatggcaccttatacaattccacccagttctcaatatttccaactgtttcaccattactctttaccaacaaaactacattctctagaaggaagagctagttcgagaattttttatctggtcaagggctggtcggctttgtcattggttctatctttgctctgacgcaaactcggactgctactcacaacagtgtcacctttgaagaacaaattcaggagttttacacttggcaccaaccagaccaagttgttaagtcttggttacttggttcgtttgctgaagatatcttaagtgtggtggtcaactgcttcgcttctcatcaggtatggatgactcttgctaatcactttaatagagtatcatcctctcgcttgtttgaactgcaaagaagattgcaaactctggaaaagaaacataacatcatggaaacttttctcaaagatctgaaatatatatttgatcagttagcctctattggtaaccatgttccagagaaaatgaaaatcttttctgctttgaatggtcttggaagagagtatgagccaattaaa

SEQ ID NO: 26167 - DNA, 596 bp, Arabidopsis thaliana columbia
  unsure (1)..(596): unsure at all n locations
nnnnnnnnnnnnnnnnnnnnnnnctaaagccagcagattaagcccaccagcccgtaagccagcaaaatatcgccgtcccagaacaataaaccgtgaataaagcccaacaagactaacagcgttaaccgcgactggatccagcgtctgccacggggcagcaacatttgcaggcccgcaccaaacagtagcgcaaaaagcgtgaggaatttcacctggccgatgagatcaagaaatgcccaagtccatgcatcccgcggcgtaatagcaccgtaccaggcgggatttagagaagccgcctttggtagcccaaaggcgctgatgtttaatagcaggatccccagaatggcgacgctgcgaacaaaatcgagcgtgacgttgcgctccatggttcctgccttttaatcagttgtgatgacgcacagcgcgcagaaactcgtggcgcgtattctgactggatttgaacaatccaccaagagaggtcgttgtcgtggcaatggttgcatcgcggatgcacgcgccttcacgcagtaatgcaccgcagcggatcgagacagccacggttattggtgcccagcaagcgtttgtagcgcaataag

SEQ ID NO: 26168 - DNA, 969 bp, Arabidopsis thaliana
ctagaggatcagaggatccccctcctgattactgataggtttttgtatttgtttaggggatgtctgcgttaactctttcagcttcagttccggcattgaagccagcggaatgtattggtgacttttgtccatctgcaacgccagctcagtatgcgatgttctttggtgggctttacctgatcgctcttggaactggaggtatcaaaccgtgtgtctcatccttcggtgccgatcagtttgatgacacggactctcgggaacgagttagaaaagcttcgttctttaactggttttacttctccatcaatattggagcacttgtgtcatctagtcttctagtttggattcaagagaatcgcgggtggggtttagggtttgggataccaacagtgttcatgggactagccattgcaagtttcttctttggcacacctctttataggtttcagaaacctggaggaagccctataactcggatttcccaagtcgtggttgcttcgttccggaaatcgtctgtcaaagtccctgaagacgccacacttctgtatgaaactcaagacaagaactctgctattgctggaagtagaaaaatcgagcataccgatgattgccagtaaatatccgcttcattgctttccagtaatgtatagctttacttggtttaacaagttattctggtatgatgcaggtatcttgacaaagccgctgttatctcagaagaagaatcgaaatccggagattattccaactcgtggagactatgcacggttacgcaagtcgaagaactcaagattctgatccgaatgttcccaatctgggcttctggtatcattttctcagctgtatacgcacaaatgtccacaatgtttgttcaacaaggccgagccagtgaactgcaaaattggatcattccagcttcctcctgcagcactcgggacattcgacacagcaagcgtcatcatctgggtg

SEQ ID NO: 26169 - DNA, 569 bp, Arabidopsis thaliana columbia
atcccctccacttcctcttgcttttactcctgggttagggtttagggtttcttggtcgacgtgatgagtcatcggcgagattacggcagtgatgcagttcacgtgagaatcacccacgaccctccgcctgagaattgttttccaaattccggcgacagttccgtctgggccactgaggatgattacagccgtgtctgggccataaactctgatggcgcagagtctccgagcaagaagacacgatcttcctcctcctccgagatcgggaaatcgttcttcaagacgaagctttgcttcaaattccgcgccggaacttgtccctactccgcgagctcttgccactttgctcacagcgcggaggagctccgtcttcctccgccgccgccgcccaattggcaggagacggtgacagaggcttcaagaaacagagaaagctttgcggttagtttaggccctcgtggcaatgttgctcagactctcaagtctccgaattggaagacaaggatttgcaataagtggcagactactggctattgtccttttggttccactgccattttgctcatgga

SEQ ID NO: 26170 - DNA, 2134 bp, Arabidopsis thaliana
ataaaaagttgaagggaattctatgaagagataatggattatgggagtgtgtgacttgaactattgatcgggccgtgccgaaatattactttatctgctacattggaattcacaaccaaacgtgtatttgttacaacccctgtgtgaggcccttgtcgagtaccttcgtgataatgcagcaatgttcgcatggacgatcgatgatatgcctggaattgatcctgacgtcacttgccacgatcttaacgtcgacccaactttcaaaccgattaaacagaaatgaagaaagcttgatcacgaccgtacaaccgcgataaatgaggaagtagcaaagttacttaacgctggttctattgtcgaagttcgatatcccgattggctgagcattcccgttgtcatagaaaagaagaacggcaagtggcgagtctgcgttgattttactgatctcaacaaagcttgtcccaaagacagttttcccctcccacgcatagatcaactcgtcgaggccaaggcaggcaacgaactgctctcgttcatggatgcattttctggttataatcaaatacttatgcataagaatgatcgagaaaagactgcgtttattaccgagcaaggaaccttttgctacaaagtcatgccatttgggttgaagaacgccggggcaacgtatcaacgattggttaatcgtatgttcgaaaatcaatttgaccgaacaatggaggtttacatcgacgacatgctcgtcaagttcacacaagccgctgatcatattgctcacttacgacaatgttttgaggtgctaaacaaatacaacatgaagctgaacccggctaaatgcacgttcggtgtcacgtcaggcgagtttctaggctaccttgtcacccaacacggcatcgaggccaatcccaaacaaatctcggccatcattaatcttccctctccaagaaatacccgtgaagtttaacgcctcactggtcgtattgccgcattaaaccggtttatttctcgatcaattgacaaatgcctccccttttaccaacttttgcggagcaacaagcgtttcgaatgggacgataagtgcgacgaagctttcaaacagctgaaagactatctctcatcccctccggttctggccaaacccgaccaaggtgagacgttatacctctatatcgcgatctcttcttcagcagttagtggggttctcataaaggaggaccgatgagagcaacgtcctatcttctacgtaagcaagacccttgatggtgctgaacttctttatcccacgttagaaaagctggcatatgttgttgtcatttcggctcaaaaactctgaccttattttcagtcacacactgtcaaagttctcacgaatcaacctctacggacgatccttcacagtccaagccagtccgggagattagctaaatgggccgttgagttaagcgagtttgatatcgactacatgacgcgcacatgtgctaagtcccaagtcttggcggattttctcgttgaactctctcccgaactcgaacccggcatgcctccaattgaaaaatggactttacacgtagacggcgcgtcttcaaagcacggctcaggtgtcggagtgcgcttagcctcgccaaccggcgaaatactctaacagtcatttcgccttgctttcccagtatcgaacaacgaagctgagtatgaagcattaatcgctgatttgcgcctagctcacggaattggagtcaaacatatacaagcattttgtgattcacaactcgttgctaatcaatttagcggtgattacgaagcaaagaacgaccgcatggatgcatatctcaaaatcgtccgcgacctctctcggaattttgaactcttcgaactcaccaaaattcctagaagtgataatgccccagctgacgcattagcgacgctcgcctctacttccgatcccgatctccgccgaatcattcttgtggagagtattgacagccccagtattgaccttcacttaactactgtcaccccaactattgaactgtcgacgttgccgactccgtcgcatgccgccgtcgcctgccgccgtcgccaacaacactacagccgcgtcgtcatcttcgagtcgctgaccctaatgagattgttg

SEQ ID NO: 26171 - DNA, 538 bp, Arabidopsis thaliana columbia
ggtttgttggtagaaattgcagatgttcttgtatgtgtgtatctgtaattgtcacaatctaggaagtgccttcgaataataaaaacttctaatcattttttttttttaattcccatcaaacaattttcatatatgttacgtcacacattttatatttggtaaaaggtcacatctgttgttttgttttctttacaatgagcatctaataaacaagattcgtctgtgtctggatataaatacaagcatacttcaaaaattgtatcaatacctgcctgcaatggatttaaaactaaacactaaactaattattctcatcacatccttagcttttcctttcatgctttatgctctcttcaaatggttcttgaaagagcaaggttcattggctgctacgaagctgccacagagccctccagctttaccattcattggccaccttcatttgataggcaaagtattgcctgtctcattccaaagtttagctcacaagtatggcccactcatggagatacgtctcggtgcttctaagtgcgttgtg

SEQ ID NO: 26172 - DNA, 545 bp, Arabidopsis thaliana
cttttatgaatttatcaaccaaacatattttatgtaaaatatcaacaagctagcatgatgcatcactgaaccggcctttaagccacaaccactatatataccaaacatttagaaacgcctccattagacaaaactcaataaaaaccatggcatttggttattctccttcctattgttcgttttggcgcacccttctcgggttatattgtttatttacacttgtgcacacggtaatctcaacaccacccgaagatcctgttaaatgtgtgtcaggaaacacgaactgtatagtcaccaactcattaggagccttcccagaccgctccacgtgtagagccgccaacgtggcttacccaacaactgaagccgagcttgtatctatcgtcgctgcagctactaaagccggacggaaaatgcgtgtaacactcgatattccatagcatcctaagctcacgtgcactgatggaacgacggattgttattagcacaaagtttctaaacacacggtgcaagctgatgcgaaggcatgactttgacagttgaga

SEQ ID NO: 26173 - DNA, 566 bp, Arabidopsis thaliana columbia
actgaccagagtgttatttctagcagtaacagtgtcatcacaaggagctcggatgtgagtaacaaaagcggaaacaattgtagccacgccgtgccattggatttttctctttctaatgaaagggatactgtgggttttatctctctctgggacaaaagaaaagttgaaagttctttgcttgtacaaagcccaataagctgttcactctcgctggctacattacctagaaactcaaactgctctctgccaccacatgaaagatggagtgctggtcagacagatggaaacagtgcagcaacgactgcttgcaatctaaacggtagtcttagcggctcagctgagaaacaagtcacggctacagtccagtcatgtggacagaactggaatgctgcaactccaagcagtgcttcaaatgtgtgggattcgaactcgggtttgacgtctttcccagacaatcaagaaatagactttttagatctctttagtccaactttcaaattcaactttgcatctactaccactgattggcaccgcattgtggctgggacttgcgaatgcgacgaatc

SEQ ID NO: 26174 - DNA, 512 bp, Arabidopsis thaliana
  unsure (1)..(512): unsure at all n locations
tgggaatatcgagttgttacacgcattttccgtccggcttgagtggctgcagccacgacagagacaagctcggcttcagtttttgggtatgccacgttggcggctcgacatgtggacctgtctgggaaggctccgtatgagttagtgactgtacagttcgtgtttcctgacacacatttgacaggatcatcgggtggtgttgagacagccgtgtgcataagtgtaaatatataatataacccgactagcgtgcgatacgaaggaggaaaagtaaatgccatggggtttgattcagttttgttgaatcttaatttgttgtgatttgtgaatgtcggctttgtaaatatatttggtatatatagatattgtgtggcgttaaggcgggttcaatagtatttaaataaaatattatgtttagttaaatcaaaagaggttgagatgagatggttcatgcaatcttgtacgtaagagagtattaacactaattaatcatattcgantattttataata

SEQ ID NO: 26175 - DNA, 578 bp, Arabidopsis thaliana columbia
ctttttggacaagtctatctcttgacttactcttctcactatgcaccttcgtggtgggcgttttggacaagtctgtctcttcacttattattctcactatgcacctttgcgagcgttgcgggttttcaaaacacttggcgaggtccggaatcttaccaagcaataacaattattctcttcataagtatggccactatgatgattaagccttgctctggttcttgagaatgtggtcatccatgtcagcagccaagctcgtgacgaacttcatgtacttgatgggctctggagagtcttcgtagcgcttctcccaaaacatagtgactttgcagacgcaaccttcctgagacttagggacgaattggaagatgacgtcatacaccttaagctgctccatcacatgaccatccagccctctaaacgtcaccgccatcttctggtcgtctaactcctcttctccttgaacacctcttgcttcccatcttcatatatttacatgaacctttcattaatagagaccctagctagtaataacacatattcatcaaatagagaatgagatagaggacgcatgtgta

SEQ ID NO: 26176 - DNA, 846 bp, Arabidopsis thaliana
caattcccacaaagatagctaacaatttcacaaacataccacacacacagggaacataatggatagggtttatagtggtaaaaccaaagagacaaaagaaggagaaaaaaacctgaacaggaactggcgattgagattagtaacctcaatacggtccatatcaatcacttcgagattacgaaaaccagaaagagctaaatccttgagaagctcacaacccaacccacccgcaccaatcaccaagattctcacataatcccttatgtcatccctcagctgtatacagaaacaaacttagctcagaaaacccacaaaaacgatacggaatataaccgaagaagcgaattgagggataaaaggcgtttacgccgggtccgggtacgaagccggggtcaacgagattcccatgacggagaagaagcttgtcaaggtctctagttttactttgaggaacttgaggaggaacatcgagatcagccattgaaaccgagagagtggcggcgattcacggagattgatcacggcggagagagctcaaaagacgcaaagccgatacactgccacagagctccgaaacttgtattggcttctctctttgagccgacccttatagttattgggtcaatagctggctaggcccaaaacaatattttattagatcttgattatattccttggtttaatttggacatttattaaaagttttttttataaaaggtttgttttagcaaatctatcttattagaaaaaatttgtggattattctgactatttatcacctttttatataattttagcaaattttccattatattgttttaattattgtccctaaatttggttata

SEQ ID NO: 26177 - DNA, 546 bp, Arabidopsis thaliana columbia
ccgctgttttaataggggttaaaacttcagttttttaacaattgtctcatggatttatggtatagcgttactttataacaattttaaattgtaaaatataaatattaataataaaatttgcaaattttaatatatattactttaaaaaataaatcgtcccgcgatataccgcgggttaaaatctagtaataatatataggtgttaacatacatcatcatgttccattgttacaaaactcgttgataaggttgtctaaattcttcctagacgaaccaataccttcctccaaagcctgcttcgccatcttaccatatgcctcgacattcctcctcagctctttccctttctctccctccatcaactccttcactttctctgcaatctcttctcttctcacaaccccttcactcgccgccatcactctctccgccactctcagctcttccaccaccaaaatcgcattcagaggttgctcgctgctaaaggaaacgccaagattggaacctccgagcaaatgctctccgtcagagaattccaccacaatg

SEQ ID NO: 26178 - DNA, 634 bp, Arabidopsis thaliana columbia
tccccaccatttaatcgaacaggctgtagcatatgacagatcgagcgccccaaaggattgccgtgtatcaggatggctaggtgacatagatatggagactgagacaatgccccttcttacagaattcagttacgacttagacaggtccaatgcacagacattcgacattgcagactctgctcactcaggacttgtcaacactgtcaggctagacttcaattccaaccatggaagctcttcacacacttgcatctaccgcttcagggttcatggccgtgaactagactcagtctctgttgctcatgcttgatctgaaagtccacgtcaaacttttcttctctttgtaacattccctctaatagatatctctcttctttttttgtgttagtttatgtggtgggaaagcttctcttagtctgtaatcagaatcatttggttgtattcgtgattattagcttcaaatctgttttggttcggtttatttggtcagggtatgtaccgccgaattgaataatatagatcttagtttgatgtccggttttggttttgtaacagagtttcaatttaagctttcacctaaaacaaatcatacaaattctaatagagtatcatattcattagttgaacaaatatg

SEQ ID NO: 26179 - DNA, 617 bp, Arabidopsis thaliana
ctagtaacctccctgaatatacgcatttaggcgttgaagctcctctctatgctcatgaaccactgcacggacaacatctcctatggacaccattccaatcatgcccttgtctttgattaccggaatatgcctgattcggttatctgtacattacaaaaacacaaacccgcatttttatttgcttcagtaggttttaaacccaaaagcttgtatctttagtggaaaaatatcaagttgtctgcttacctgtcatcagttgcatagcacgcaagaccttggtctccggtgtcacagtgataagcttattctgcaattgccagttcacagatccagtcagtttcaatccacaaaagcaaaaaaaaaatcgtacaatcgtgcatttacatacctcttcagtcataatgtctccaacttttgttgatttggatgatctcccttgcacaatgatcttccgtagataatctagagaaatcacaatgccgaaaagtgaatacacataccacaagacacaacaaaaaaattattaatgattagatctaattttaccctctctgtaatgatccagcaagacttgttgctcccaggttcacgaccacaaggcaccacattgtgttgtg

SEQ ID NO: 26180 - DNA, 575 bp, Arabidopsis thaliana
tcttagtttccacagaaatgaccatcaacccaaaccaagtaagaccggtccgattgatcatcaaacatcttttgccaaaaaatgacataagcccatcggtccggtgaggtttccacgacaaaccggagtttttgttgaagtactaaatccggagagaagaggacactatggctgcaggagtttgttgtgtaaaagagagcaaagaagaggacaatgatggagagaaagtgagattatacatttctttccagtgatcccgaccaaagagaatttagagggttagagaagacaagtggaaaaggatgaataagattctaaattaatagagaagacgatattatagtagtaatatcaaattttcattaatgattttcgtgaattaaagtttatgataaatattccaatagtagtaagttagtcacgtgaaaactgaactgttttcctactttaacgttataagaacaacaatttatcgtatagtggtccaactttgatgaaatagacaatatatcattctttgccaaaaaaaaaaaaaaaaaaaaggcaatatatcatttagatttatattgaatgat

SEQ ID NO: 26181 - DNA, 568 bp, Arabidopsis thaliana
  unsure (1)..(568): unsure at all n locations
nnnnnnnnnnnnnnnnnnnnctaaagactcagtagtgaatacgcattgctgtactggttatcaccatcgctcatctgcacaatgacgtgacttcctccggtaaacgcaggtaatggtttgccatcggttgccaccagcgtgaagcgtttcacctgttcggtaaggggttcaacctggctcacctgtacttcaaacatttgatagtctgacattgctgtactccatcaaaaatcagcccagcggcggaaaataccgccgccgatgtcattagtccttaaacacctgcgccacgagattatggaaatgggcgataccatgttcggaaatgccactaccgctactgtcggccatgatgcgcccctgaccacgatagccacgcgatttcagccctttctgtacgctttcaaccagacgtaaatcttccggacggaacacatcgcgataccactcaatcagcgatttttgctcgtcggttaactcttcattggtgaagtaaatatcgtagttttgcagggtagtttcagatccacgggaatcataaatgaccgcatcaccctttgatcggggt

SEQ ID NO: 26182 - DNA, 345 bp, Arabidopsis thaliana columbia
gtaccgagctcagactcagtaatcagccgacatagcggtgacacaccgcaaccgccgccattacggtggttcgagcggttccgaatcgcttgggagatcgcttcagcactctactttctccacacaaacgaaccaagaccaatcgttcaccgcgatctgagaccagcccaatagcctcctagaccggaacaatgtgagcaaaatcggagacgtaggcctttccaaaatggttaatcttgatccttctcatgcctcaacggttttcaacgaaaccggtccagttggaacattcttcgacatagatctctgaataccaaagaaccggagtggtaactcccgaatctg

SEQ ID NO: 26183 - DNA, 467 bp, Arabidopsis thaliana
atttctctttatggccgtttgattatggttgagcggatggaatcagtattcctacagcttcaacaactcaatatccttcccgattccagcacctacaacaacttgattgctgggtacatctatgcttgggattgggataagatggaagcaactttccactccatgaagaacggccttgttaagcctacgcttgccacctatttgctgatgctcagagggtatgcaaactcgggaaatctgctacggatggaggacatgtatcaagccgtcaagcgtcacgttgacaggaatgagattaagttaatcgagtccatgatttgcgcatactacaggagttgtcacaaggataggatcagaaaaatcaagactttatccaaacttatccccaagaaaagttacaagcccttgggttgtaattgctcttgatgcaggtctatgctaaggatgataatctacatgccatggag

SEQ ID NO: 26184 - DNA, 1339 bp, Arabidopsis thaliana columbia
atcttgctagtaggctatagctaaaagttgcttggtcttggtgtttgtatcagtgatgagaatattttggatgcattatctgctgagattgattagctattcgttatttggattttctaatttcctttatttgtagtgttatttggtggaagatctttgtagtttgtatgctctgtgtagatattaggatgagtaaatagtaccagccttaatttttctcgatcttgtgttgtgttcatcatctctaatcttaaattgatgctgctatatgtcttgattttgctcttttagtcttcacagatggttcataatcacaagttttgttttagcatccactcgtagttgcagaacatactcatttgattttgtttactcaatatctttctctgggaaccgtaactgtagaatcaatatttcaattctgattgaactccatcatttatccggaaaaggaaaattcttggcatttggacttggtagaacctgaaaagattgttgttttgatgggttttaaggaaggtgaaaccataagaatcaacgtgaagccgaaaccaacaacaaatggcactgggatgctctcagctgctctttcaggaacggggaagccaaaacctctagcacttgccccaccccccaaagctgccggagtaaccaggtctcctttacctcctcctccaaacgatcccgtcgcttcaaggattgcatctgatggctgcaaggaatcacgcaggaacgagcctctatctgatctatctcagctcaaggtaaataaaccttgtcttcttaattacatttattcttattctctaaggttactctaaattatccttgatttggtaatactcggcagaaaaatcttccttcaacggcgggatcaggatcgagcaagtcaacaggagctgcatcaggttgggcagctttctgatgaatggagtgtaaaatttaagttattggacaagtccggcttcatcttcttgtgacttgagagcacgagacaatagacaacaatggtggtcagccaacagtctttttgatgtatgttaatggtaagttgatgtgtgtttctttgtaatcctcccacactccctgttttaattatttttcttccttataatcatcgttgttacattatcgattatcatttgtatcactgagatattaatatatacaaaaaggctttttcataatttcaacttttgcttctacgtaaaactaaaatgctaaatctgtttgctattgcatgactaagcaaataaatgtacaagaaaatattacaaaaaaaaaaaaaaaaacattttgtactcccttatacgctgtcgtttggttgacgatgcgtgat

SEQ ID NO: 26185 - DNA, 619 bp, Arabidopsis thaliana columbia
ccgacttctctcgtcggaatctgcaaatttcgaaatcgcgaagatgctgagaaaactactaacgcaaacatcttctcgccgtcttctcttttccggtgttcctcctctcttctctaaatccactatttcaccgttttcctcattatcctcttctccggagccaccgtcctcagagagtcccgccgttgaacatcccggaacaacaatctccatcgatcgttcttctctctatactcctcccggttcgtatctcactctcacactctatgtttgacagatttggtatctgattgttggaaattttagatcactctcatgaatccacacctgattctgagctcgttaagcatctcaagagtattattaaggtagaattcgattttcatacatttttatctttcatggtagtgacaattcaaagaatctgaagtggtttatgtatcatagtttcggggtggccaatctcagtagctgagtatatggaggaggttttgactaatcctaaagcaggattctatatgaatcgtgatgtttttggagctcaaggtgatttcattacttctccagaagttagccaaatgttcggcgaggtgattacttggcgtttgttgatttgaga

SEQ ID NO: 26186 - DNA, 529 bp, Arabidopsis thaliana columbia
aattagagaaaggataagatattcaataaagaaaaattttaaaattgattttaatttggacaagaagtaactcacgttcgtatttgtttttgagtagcgtaagtctacgtttaagatgtgagccaacgaggttagcattctcttggagcttctcttcgtgaaggactctaagtactgcgtgtcctgcggccgtgcacattggatttccgccgaaagtattaaagtaactccgacggcttaaaacgccggcaatctccggtgtcgtcacaaccgctccaagtggtataccgttaccgatcccctgcaaaatccaaattagaattgatgatgataaattgataacgatgcatgaatcatgataatgatgaaccttggccatggtgacgatgtcagggataacaccatgggattgaaacccccagaaatgggttccggtacgagcaaaacaggattggacttcatcggcgatgcaaactcctccggctttcctcacgatgtcgtaagccgccggtaagtatccgggagcaag

SEQ ID NO: 26187 - DNA, 632 bp, Arabidopsis thaliana columbia
taaaaaaagaagaacttcggttgttactgtaagaaaccctgaacaaaaccaacaaaatcttcatagggtttctacttcttcatcgctcctcgaccttaacacgatccccggtgattcttctgacccacgtaacgaacttcaagggcttttatcttcttcttcatcatcgtttcttggagattacgaaaggaaaaccccacaaaacgcttcttcttcttcaactttacttgctgagtacaacaccgagatggcaaacccaccaaaccctaattctgagacaagcctcaagagaaagcatagtgatagtgaacccaagaaagcaaagactccttattcatggaaagggagagaggcgccggagtggctggtcaagatgatgggaacaatgcagggaagcgaaggcccgaggctaatctatgagaagactctgaccgaaacagatgtcaaaccagtccagagccgtctcttaatgcctttcaacaccctaattcgtaacgactttttgacgcctgttgagttgagaatcctctagaattagaagatgaccgggatggagttggagcgctctagtggatcatgggaggtaagtggggtgtgatttgaagaacgggagatgaagaatatcagggaag

SEQ ID NO: 26188 - DNA, 545 bp, Arabidopsis thaliana columbia
tcgcaagaaaagtaaaaggaaattacccagaaaaagaagaagagtggtcccctaattgataaccaacagaatcatgaaactgagattctgaaggtaaatgtaacgatggaagaggcggacactatgctgcatcaaatccatagtcgatgtttcattttgtgagaatccttccaaattcgaaaccccaatcatcggcgtataaccctcttgaaaccgctgcaaatacgactgatcaatctccgtacgatcatatgaagtacgctgctgatctcgatcctcatagtattgggccccggctctctccacgtcccaattgaagcgctcgagataagagaggacttcttgtgaaggcaaatcagaagccactgctaggaatagattgattcgttcttgcttcaattcatgcgatagttcctgcggcggattcaaaacccgtcctgaatggcttctttttcttggcggcaacggattcgaagtcagacttggataattgatcgatcttggatcctgattcgaaacccgaggtggaattatcgttaatggag

SEQ ID NO: 26189 - DNA, 600 bp, Arabidopsis thaliana columbia
gtgatcttgaggatctcgccagcagattaggcatattcaagacttcttcttcgtccatgaactctgtcccacaccacgacgaagatccaacatcattatctacgtggcactcacgcgctctcgacttcgaactactactcttcttctcctttgcctttttctcctcctccccttcctcacatcccttcattgctgctgcggctgccgcagcggctcgtatatctgctgcggatgttgattcaggaaccgggtatgacccgacggatccagggaagttcaagacagcttctcttcctttaagagccatagcagccacatcataggcggctgcatgcatctctgccatggggtaagttccaagccagattctcgtggtttcctcggctcacgaatctcggagacccatttcccacttcggcaccggattcctctgtacaccggaatctttctccggctacctaagccggcagaagccattgaactattcatactattagtcgtatatcagtagcaagctggagaagggtttcacacgtggcgaagaaggatttgcacatcgtgcgagtggcaactaattaaagaagatgaagaagttttggg

SEQ ID NO: 26190 - DNA, 536 bp, Arabidopsis thaliana columbia
ctaaggagaaaaaaaacaaaacattacaaaagccgagtcatgaacagttcttatatgtataagatcttcaggaacagctatatggcttccatccttttgaaagtatttcaagatatacgataagagttgagggttgttttctagtcacctctttgagatcttggacggaattttttagtgtgacgtctgatgagtctcttagcttttgtaatagttaactgccgagcaaaaggagagaattcaacatcactgtcactccagtccccgtggaagtcattctccgcttcacctctcatagttctcaagacaaatgctttggccttgcgtctttgggtattgaagagtcctcgaatagaagtaacaaatccatcacctgctccatcattttgacgcttaaaccatgtgacttgttgttgatcaggtttcccagtttgatcgttgtcacttagattcaggtcattgtcagtagactcgcgattgttatgtgacttgtctttgaatttcttccctgaaaatgtgaatggatagagactata

SEQ ID NO: 26191 - DNA, 565 bp, Arabidopsis thaliana columbia
cgaagaggatgacactggagctgatgatgctgtaaataaggtggaagtggaatcaagcggagtaccagacaaaggtgccgttacagcaggaaaagtaaatttatcaccagggatactgctactggaattgaaaccaaacaacgattttgaagataaactagatgctggtgcaccagacgacatggctgataattgagcaccaaaacctttgctagattcatcatcagatcctgatgatgtggtagacagccgctgcacacttccagcagctgtttcaacaaacgcattggccttagcttcggaaaatttgaattctccagccttctttactgtctgttcaagtacagtcgaggccactggtcgtttcggaagaaaacttgatccccctggatgtgaaactgtccttgtatccttaatctgcgatggggcagattcctcagcatcagaagttgtattgctagacttatttccagaccaattgaaacttggttttgacgcagagattggagagctggtacagggactgttagactgtggcataggtggcacgttttgaatgggggtg

SEQ ID NO: 26192 - DNA, 477 bp, Arabidopsis thaliana columbia
cttatgtaatagtagtgccctccacaatcaaaacttccgtaaacgaaagcctagaatctatgcgttgagatagcacttactgcctcaggatagcaaacatctactacaatatagcgattttcctgcagaaacaaaagtagattacaagagtggtatatcagatatatgtggagaggaaggagatgaaacggtaggaattaacgggacatttgatatgtaaaagttacaaacatggtatgattagttcatcagaaacaagtaacaacggtattacatagccaaatgaggaacatgagaattggcagaaaaaatacctgttcaaaaccaagaaccagatttgcccattcaatatctcttgtaaccagcaaattcgatcgtgcaagcagagttgcaattttggcctaaaaagaaagtgaataagattatgatttccaactcctacatttcaagatatgcaaggataacaagagtacaatg

SEQ ID NO: 26193 - DNA, 646 bp, Arabidopsis thaliana columbia
  unsure (1)..(646): unsure at all n locations
gttaaatattaaagtagtgtattttacattttgtctgaactttgtcatctttgtttcatgaatggtcaatggtgaataatggggagagaaggaacgtgaataaagggatccacaagtgtctccaccattttctgagtaaaaacaatcacatcctttcattttcaaacccctaaaccaaattgtaaaagtcagaaaaaaagaaaaaaagaaacacacatacaaatcgaaaagcttttcttcatctcccacgttacaataagccctaagaacgaataaggcaactacagagagaaaagatgaattcaactacaacaaaaaacgtttgtggagacaaatggtaccttaacctagacaggccagaagaggcattgaagattcttgtattcattgccattttcgtcgtccgaactctcctccattatctcatgaagcctctaggccaaccttacctcaccaccgactttgctgtatgtcaaatatctttttgttctttgtctatctcttttgatttctatattaactcaaattttctatgcatcagatagggctaattctaggtaatattccaaggtttcgaggggcatctcggggccttctctataccctcaacaacataatagaatttggaatgatntgcgatatgttt

SEQ ID NO: 26194 - DNA, 527 bp, Arabidopsis thaliana columbia
cacacctttggagagttttccatggcaatgatccaagccaacagtgtgatggaggatcagtgccagatcgaatcagggccgcttacattcaacaatccgacagttcaaggcacatttgttggagtttacgatggccatggaggtccagaggcttccagattcattgcagacaacatcttccccaagttaaagagtaagacaccgactttttttatttcctttattgttgaatctgccaggcacactaacactggtctcacatgaacagagtttgcgtccgagggtagggagatttcagagcaggtgatcagcaaagcatttgccgagacagacaaagattttctcaagacagtgacgaagcaatggcctacgaacccacagatggcatcagtggggtcatgttgcttggcaggagtgatatgcaactggattggtgtatattgctaacacgggagattccagagttgtgttgggcagatctgagagaggtggagtgagagatgttcagttatctgtagagcacaatg

SEQ ID NO: 26195 - DNA, 474 bp, Arabidopsis thaliana columbia
cactccacttctttgatgatctttcttttgcgcagaggtgctgtgaccactgttcctggagcactgtgagctttccttcgtgcttcttttcttctcttcgaatcgttcacagttcgaatgatacccatcgctttgtatattggttttggcaagtgcctgtgtctgtaattcacaataaccaaaacgttaccatgttactatagttatcttgtgacaatctccagagttaaagcatgggataaaaccacagttttcattggtcatttacctcacaatgcgcttaacctcagaaagatgcttgtaccggttcttcacagcctcgttgtactcatgcttcttatgttcccttggaagaatctgcagcactacacagcaattaacattgacaattcaccgttccaagttaaaacttcttaagacagcatgtacgagtcatatctcataatcatatgcactattggatcaactgctaag

SEQ ID NO: 26196 - DNA, 509 bp, Arabidopsis thaliana columbia
caatacagtaaaggacatgactttgaagaaaactaagaaaacaaacctgtccatagttgagtacaccagcagatgggctaatttcaatattcccaaaacgttgcaactcaccttttgagaactctccatcaatgttacatttcatcacatacatataatcagctggcttaagcccaaatccaacggtatcccaatctatgtcggctaattcagttaccaacgtactaattcaacataaacaatacatatatataagtaagaacctgagaacttggacaaatacccaccaaaaacaaagaacgaacctggaagaattggacgaaacagcgttgcatcgagtaagagagattccaccattagaagaaacagaggaagaagaatgctgaagctgtgaaagataatcggagaaatgggtcagataaatcagaagatgataagagagggagatgagaaaagagttgaccttgatggaggcagatgacggcggcgataagttacgagtagaggag

SEQ ID NO: 26197 - DNA, 630 bp, Arabidopsis thaliana
tgttttgctggctcataaatgttgcactttctcattcgaatcaaatcaatgttctcttgtttcagtgaacggaacacagaactcatgagagatgccatacacactcgttacacactgctcccatacttctacacgttgttcagagaagcaaacgttacgggtgttcctgttgtacgcccattatggatggaattcccgcaagatgaagctacttttagcaacgatgaagccttcatggtcggtagtggtctactggttcaaggagtttacaccaaggtacttgagcgctaagtacaacttcctacttatttatattttggcctttgtatctctttacttaatcatatactccagataaatgatcaaaccctgccacataccctcttctcgtctttctgcaaaattagggaacaacgcaagcttccgtgtatttgcctggcaaagaatcatggtatgacttgagaaacggtaagacttacgttggaggcaagactcacaagatggatgctccagaggagagtattcctgcatttcaaaaggcaggaatcatcatcccaaggaaggaccgctttaggcgaagttcctctcaaatggacgatgatccttatagtttggtacgtacaacacttg

SEQ ID NO: 26198 - DNA, 781 bp, Arabidopsis thaliana
gaggatcacgacccctcatcagactctggacttcttgcattctggagggaatccacgagggaaccttttgagatcagagcaataattatagatcatgaagtatttctgaacccatctgagtctcctcctgccataagcattgagctcggttgccacttgcaatttaccatcaccaaaagaactcttgaatttagggtcacatcctgaagaggctgtgcaagccgcagcgttgaatcctctgtagtaagctgtgaaaggagccttggaccagtcagtcttgactagaccacctctcgtggcccaatcgtctgcattccacaggctagagtagatcctcatgggttgactctttgggaaaggaacgccgagcttctctgcattgttgaacactctaatgggtaaattgtccaccaagaatctgcagagacaagaacaagagagtcaagatctacgtctttcacttattgttagagaaaatagatcgatggatgtttacatgatgtgttgggtctccagacaatggagtaagtgtggaagttcttggttgggtcgaaccagagataaaactgttgctctctgtctcctttcccttgagcaaagacattggtgtgaagaacataaggcttccctgtctcgttacctagaaactcaaagtctatctcgtcatgtgttgctccttgtgaagacaactgcaaacatgtacgttcaaacaaatttagaaaagagtctcttcagttttagcaacattatgagtgagtgtgagtttgaaaacgctacgtag

SEQ ID NO: 26199 - DNA, 501 bp, Arabidopsis thaliana columbia
tataaccgtttagattgatgaggatctggattttgtcttggtttataattttggcgatacgatcagatgacatagcagaaacgtccaggaaatgctcggcttctgactggattcgctgtctccactcagtattatcatttgcactcagagcatagcagaaaacctgggaaaaaatgtgatttactttgctgaaaagccaaaaacaggataggcagatacagaatgatataccatcaattactaaagttctatattccacacacaggacccgtacggttccatacattcctaccatcataagaactaaacccagcatgtacgaattttatagcctcactagaaaacactgggttgaagaactcaaactctcgatataaaatcagagcagacctaagaaatggatcaacaagtatccaagtgcaggatacaaacctcaacgttttctctgttgtgcatccaaacactgatcccatgaggtgtgacaacggatggttaccaaaa

SEQ ID NO: 26200 - DNA, 620 bp, Arabidopsis thaliana
  unsure (1)..(620): unsure at all n locations
gattacacagatacacttgctccttgcaggatgtggtcgagtgttctgttgcacactcagaggtaaaacccacttcacttaactctttatacttatctcctgaaaatactaacaaaatgcatcaaagacaacaaggaaaaaataaaagatatatacattgatagacataggatttcctcccaagtgagtttgttttaaatctctagcttgagtactcacacttattaggcagggaaagtgtgacagaaaggacttaagaagtccttttcttcatcgagcttatcatcattctcagtatcctccattgatagctgcgcaactgagtcctcaattcatttttcctctaagtaggctgcttcctcatctggtagatagtctacttcaaaccaaactgaagggacatcaaagttgagtcgaggttaatctcctccttgaatttgacttagtgtgtcaaggtctccttgaactcctatcagcaaatcaaggttatgtccaaggcatatactgaaggaaccaagcttctttaccatagagagtggcattaagctgactgaaactccangatcacatagataattgttgaaagctaaatgcatgatagagcatggcagagtgaagga

SEQ ID NO: 26201 - DNA, 592 bp, Arabidopsis thaliana
cattgttctcttatcagtacttcataactggtaaattaatttgtctcccctttgcagtcgtctggaaagccacagaagactgatgttgaatcacagaatgcaaaaaccgcggtcactgaagtgaagaaaccttctgaaggtaaaaaatttcaattttgtcttttttcttctgaaattgtttccgggcatacactttccattagactggaaccatatgatactgatagttgctttgggttgctgtgcagagacagacgatgctgtgaaaatatgttacaggtgtaagaaggttggacatcttgctagggattgtcatgggaaagaaacttcagacatggacaaagtggtgatggaagaagacgatattcatgaagttggggacgaagagaaagaaaaactgattgatgtcgattaccttactggtaacccgttaccaaccgacatccttttatatgcggtccccgtgtgcggcccctacaatgctctccagtcatataaatacagagtcaaagcgattccaggcagcatgaagaaaggaaaaggtaacaacacattctcttccaagtagttgtaaatgtagagcttttggact

SEQ ID NO: 26202 - DNA, 349 bp, Arabidopsis thaliana columbia
ggagccccgaagctgatgatctacattctgttatccaatacttctctaacttgaaccgtgttgttactataattctcggtcacagtaaaggtaagtagtaccgatctttctgcttcgagcaacggattttcaaaaggggtgaatcttacattgcaagaaactcaacttatactttgacattgcataggaggtgatgtggtcctcctctatgcctccaagtatcacgatatccccaatgtgatcaatctctcgggacgtaatgatctgaagaaaggcataggagaacgtcttggtgaagattttttggaaagaataagcaacaaggatacatcgatgttaaagatggtat

SEQ ID NO: 26203 - DNA, 524 bp, Arabidopsis thaliana columbia
ttcaatgtcttctggtactctcaccacttatttgttatcgtctactcgcttcttgtcgttcatggattctacgtatacctcatcatcgagccatggtacaagaaaacggttagtaacttattaaccattagactcattacagagttggaatatggactctaattttggttttcatgtgatctaatagacatggatgtatttgatggtaccggtggttctttacttgtgtgaaaggctgattcgtgcattcaggtcaagcgtcgaggctgtttcagtgctaaaggtggaatctataaacatttctatattgatatatccaagaaaaggaggactttgtaaattcatctctattagtaccttacattttcaacaggttgctgtgttactagggaatgtcttgtcgcttcacttgtcaagaccaagcaacttcagatacaagagtggacaatacatgtatctcaactgttctgcagtttctacattagaatggtaaatgatggaaataaactgatattatgtgaaga

SEQ ID NO: 26204 - DNA, 558 bp, Arabidopsis thaliana columbia
gtgctattgatctatatacaaaagctattgaactcaacagcaacaacgctgtgtattgggcaaatcgtgcatttgctcacacaaaactggaggaatatggcagtgcaatacaggatgcatcgaaggccattgaagttgattcaagatactctaaggtatcatcctgtgacaagatgttcctgtttcttcgtgtattcagccatattcactgattatctactgaatcacagggctattacaggcgtggtgctgcgtatcttgccatgggaaaatttaaggatgccttgaaggacttccaacaggttagtgtttcttgcacgagcattgtgccatttaagttgttgtctctttcgtttatatttgttagctgctgatctgatagtcctctttctagtttactctaaactttttgagtgaggatcagctcagttgagaaatgtcaaaatactatagatgaaatgttgtaggcttgtatagcttgaacccacccaaatggtcataacttgattgttttggtctgatcaagtgattagtcctggaaacttgatagagtgatag

SEQ ID NO: 26205 - DNA, 488 bp, Arabidopsis thaliana columbia
caagccaaacattatcaaggagttttttaaaatatataacaaaattgacaaataacactattaataatagtttttttcttttcataaaaagacagtgcatttagatggacatatacaatgaattcaaactaccttccaaccaaccatggactacgagtttattcaaaagtagaaaataagataattgtaacattaattgtcgtcatttaattgactcatttattccgtgaattactatgtttctaaataaaattcttgttgttgttcaactaacgcatttacaaaaaacaccattaacatccttctaatcttccttccttaccatcaattttttcttctttcttaagttttacaaaataaaccccctgaattgttatctatcatttacaaaaatgttccaatataaactccaaaacattcagattgatatgttgagatcaatcttaggcttcttcttcataggatttgtaggcaaaggaacaatggta

SEQ ID NO: 26206 - DNA, 492 bp, Arabidopsis thaliana columbia
cctcaactcagagttataaaaactgacaaaaaatgtcatcccatcaagtgttgtcctactcaactccttccacttcatagagaatagtttatacaccattggcttctcgttgctacatgtaaacattacaaagagctctcctttcttctctaccaagaaaactgctttcccacaccacatatattggttctcatggacatacgggcatctgagtttatccgcacaaatgtaactccattcacgataagatggttcaaagctatacaaagttccttcagcgttaaagcaatagaatcgatctctccgatagacaaggttgctttgcatgtaaaacaatctcagaaaagtagggaagtcgttagtaatccatttagttgctccaggattgcaagtactgacagtgacacgattaacctcacccggaacaaactttatcgctagtaacacacaatcatctgatgtaggaggacacagagacgcaatctgctgaaa

SEQ ID NO: 26207 - DNA, 557 bp, Arabidopsis thaliana
atttcctttttcaaaaagtgcaagtaggagtttctggatggatgtgtaacaatgcttgtattaacattgtgtttatcttcatttccatcgtcagatcttttatctggtatcaagaaggaagctgaagctggaaggttgccagcaaatgttgcagcaggaatggaagaattgtattggaactacaaaaatgcagtaaatgaatccttttatcactcactagtttgtacgattagtgctatgctttggaattaattagattaaagaacatcagtccactgaacttttgcattgttgtcttactgatggtttttaggttttaagtagtggagcttccagggcagatgaaactgttgtatcaaacatgtctgttgcttttgatcgcatgcttcttggtgtggaggtacttcttctgtcaatctcttggaatgattttctactaggagatgtcatctaaaaattcttttacttgagcttcgttgcgctgtgaatatttcaggatcgttatacttttaatcgatatcataaagcagtcagagaaccatttgactactacatgt

SEQ ID NO: 26208 - DNA, 596 bp, Arabidopsis thaliana
cagttcagcatcatctataaatgaatcttcagtgtcatactcatcatcatcaggagcaccgtctaactcttccccatcactgctatcgttcccctgagatttattctctgaagtaagcatacacttttcagagatgtgtgaatgcaacagtgctattgcatggtatgcaaaaatgttgtgaatgtgactaatcgaacatataacaacctaccatgatcagtgtcttaacaaggagtagcatacctcatagagcctctctatcttctcaataacagcgttgaaacggttacaatgaggttgttcattcgtttcaatctctactggatgcccctacattatatacgaaaatacagctgctgaaaatgattttaacactcatattgtatgcataagaagaatatattgtgaggaagctgcaagcatattataccatcttcaatgaagatccactattatatgcttcattctcttgcactaatagatattaatagaactttctctatattcgcactattacagctatagtttcattgcactatgtgaccagatccttccagataagtaaattgatggcaattccattgatacgatgaagt

SEQ ID NO: 26209 - DNA, 604 bp, Arabidopsis thaliana columbia
tatctctctaaacggtggtacttgcaagacaactcaaggagagaagtcaagcgattagtcaatctgtgcaaaatacagaaaaggtgagatgctaaccatttcctcacaaaaccaattattcttacttttttaatcaacaactatgtaacaagagaagaatctatattggttcatatatccttttaaccggcttcattgctcctaacatttttctttctttcttttcttgtggattcattaacaaaagatacttgactctaccgaggaggccattgagcaaagcctagcgagcacaggacacgcgacaacaagagcgacaaagatatattcacaaagctcaaagacaagttgcttccagtggctcttgatcttcgccatgatctgtgtgttcataatggttgttctgttgatccgggtcacatagaaattgttcagattgtaataccaaattagtgaaatcaaaaaacatttcagtctctttatcatacagtttgtgaaagtcttttgaactttgtaattctgagttttgatatgtgaactatacttctaaagatatgcagaaacagtacaatttgttgtgagaggaatgagaatgaagattgta

SEQ ID NO: 26210 - DNA, 579 bp, Arabidopsis thaliana
tgataagatgcttcttagcttttgtccctaacaatccttccaagatcgagaccaatctcccaaccggaaccggggacgtgtttcctagattgtaaacacgtagctgagcttgtcctcgcttctttccgccgcttccggtgcttttctcagccgtgtctaacgcaccgacacaacctttaacgatgtcatcgatgtaggtgaagtcacgcgccacttcttgattgtcctgagttctgtaaatgtcgattgatttaccgtggaggatgtctttagtgaagaagaagtaagccatgtctggtcttccccatggaccgtaaaccgtaaagaaccggagtccggttaaggagagaccgtagatgtggttgtaagtatgtgcgatctcttcaccagctttcttggttgctgcgtaaagactcgctggttggtctgttcggtgttcttcagagaatggattctcagtgttgagaccgtaaacagagctagaggaacccaaacaatcgcaggttgtggattagctgctttagcacttcaagaaggttaacgaatccgcgatgttggagcgatgtagattgagggttt

SEQ ID NO: 26211 - DNA, 872 bp, Arabidopsis thaliana
tcgcatttactggtttatctactaagtcccacgtgtggtttttttccatggatgatatctcttctttcatagctccattccataactcccaatcttgatcacttaatgcctcttggtttgttttaggctcagacttacccctatcttctgtattgtaggcaaactcaaccatattagactcattatatcttctgttcaacttaacagtccttttcttcctgtctcttactagtaggtagttactgagatccacttcttcagtagaattatcactactgcttccttcttcttcatgagtttctgtctgcacttgattctgttcattaacaatctgttcttcagtaactctaccttgctcaacgctttcttgttctgtaatactttgatctgtgatattagatatcagcggattagaaccttctcctatgttctccatgacttcttcatagaaactgttctgagaatcagttttaaggtctttgtacatcatttcctctctgaatatcacgtttctactaatgacacacttcttttcttcaagtagccaaactttatatcctttaacaccctcaggatagctcgtgaatattcccttctttgctctaggattcaacttcccttgatctgcgtgtacataagccaaacaaccaaaccttctcaatgaactcatatccggtaacgctcctgtccatctttcttctggcagctcaaagttcgttgcagtagagggagatcgatttattaaatacactgctgtagcagcagcttctgcccaaaatctcttttccataccactttcacttaacatgctgcgaactttatccattatagttcgattgagtctctcagcgacaccgttctgttgaggtgtg

SEQ ID NO: 26212 - DNA, 600 bp, Arabidopsis thaliana columbia
tgatttcatctctttctgcagcttgtggacttgaagggtcactagctacaagctccttagaactgtttgcctgttcctccactgaagacaagatgcaagagctggtttttgatggatcagttgagatgttcgtacatgttttttgcttcaaagcactgtaaaatgcatgcctgctctgagtttgaagccaaggaaagtttcttttcagcggcttttccagctaacatgtttacagaagctcccctgagatcccttggaccatttgtgcttctcacagaagcagtaaattgtgtggatggggcagtggtcggctggctagcggcaactcggctgttgggtggtgaactccagcaactaccccattttccctagcaggtttgagaatcaccagcttcttagtcgtatcaggcttgatctgactaccaggattagactgcatattaccgagcatcacagaggactgctgttgggtatttcttgaagaagcaagaccggtttcacacttcgaaacattggtttggtcttggatttacagaagagttatgacctgagaagtcaacaacatatactcaatgtacccaaggtaactgcagaaataag

SEQ ID NO: 26213 - DNA, 1157 bp, Arabidopsis thaliana
aaattttataaaacaaaactaaataaatttgaggtagtattaatactagttttaacatgtgacataaccctaaagaaaattacagtatataatgactaatccctgagggaagtttgctattttttttttttggttggtcaacgacgtgttcaatcgtgtctagattgccatttctggcaaaattaataattgaataataatatagtattttagttttgccatctctctctattagttcgttctataaatacgcgtacgagtctctcacaaaatcacaagtggggcaaattatccttacattaacaatgcctcgacttcatcattatctctcaaatcaagcgttcctcgtccttcttctcttctcttccattgcctcagcagctgttgtcgaacatgttctccacgtatttactcttataccactttctctcccttttttaataacctaaccaaaattttcgaaatattaactattaattttattactgtgggaactatattatattaccaatttccattttatatactagtcatttatttcttaaaatcggaaagttgttgaattgcgtgtgtttgtgttttcttttcctcgatttcagaaattaataccgtatttgatggatctctaatctatgagccccgatttttagtttttaactttgccggtaaaaaacatttaatagtaacacaatactaataacgacgtctaaccaacagatccaagacgtcgtggtgaaaccgttatgcaaggagcaaataataccggcagctaatggaagtcttcccggcccaacgataaacgttagagaaggcgacactcttgtggttaatgtcattaacaactcaacttacaatgtaaccatccactggtaattagataacttattgatctcattactattgttttttttctttataatggaagtcgatttcaatatcatttcatcaactaattactgactttttagatgttaataaaagttatttcttaatttcacacatatatgtataggcatggagtttccagttgaagagcgtatggatggacggtgcgaatatgataactcaatgtccgattcaaccaggttacaacttcacatatcaatttgatatcactggacaagaaggtacattgttatggcacgcacacgtcgtta

SEQ ID NO: 26214 - DNA, 585 bp, Arabidopsis thaliana columbia
  unsure (1)..(585): unsure at all n locations
cgactctnagatctatcaatttacgtcaaggagaagaagatacaaagaagtaaaccaaataagatgctaaagaataatcgtatgagtatgtctcttgttgagatgttcaaacatggctgccctgagtttacaatatcctttcctgaagttatcgatacattcacagacattgaacctgtcaaaacaatgcacaagtttatttcagatgaagataaccgactactagagtttcctatatgacatgactctatgattacacttacaatcatagcttgcccatccaatccgttgtcgagcaagatcatatacaaagactttatctttaagcacaagatctgcaaaataaaacaggacagataaataaacactgttgaaacaagaagaggcggtaatcagcagtttttgaagctcaatgtctgacctcctaaaatggtttgttcttccggagctttctgaaaaccaatgcaccacatggacgcaccatcctgttaagataggagaggcaagtaagaagaatcatataaaagcagactactttaattctaatagtnttatgtacatatacaagcagaagacttacataga

SEQ ID NO: 26215 - DNA, 463 bp, Arabidopsis thaliana columbia
gatcacgatggaaatgagcacaccgatggttaagtttggctgtgtttcagctttctcaataagttcctacaaacgaaaattgcaaattctcatttaagattcttcattatacaatatgtttctaaagtctgaaaatgagaacttaccataatctttgacttgtacgcactaaggacagaaatgtctgcaaccttgtacaagaggtcgaacaccttcttctgcagtaatgcacatacataatataagtacaaaggatatgtataagcattccaaatttgtggcgaaaatcaatatacctggtaactcttgagaccatctgcctcaccagcagcttcatcctctgccttttgtttgcgtttgccacatcaaacttgggcttccaagtgctttgtctgtaagtttcagcaaccttctcgtctttagatatcaagatgttgtcaaataagataccgtcttgcattgt

SEQ ID NO: 26216 - DNA, 364 bp, Arabidopsis thaliana columbia
tttcaggagtgatctttctttgtttgcatctatgcaagttcaataatagtgagaaaagtattaataatctgtgtcattgttgttttggatattgacagagaaacagagaactatgaatgatctgcaggataaagttgatggatacctccagaaggtaactatagtttactcagcctgagtgaattagtaactactgcctataactttaaagtaaacagcagcgtaattgtgcacccatgctctgattctaaccctgtctttgtgccaggattggtgggtcgacctacttcaaaaaaataattataaggtgtcggacttcagtggcaaaatgattctgctattggatataatatctatgagtgct

SEQ ID NO: 26217 - DNA, 543 bp, Arabidopsis thaliana columbia
  unsure (1)..(543): unsure at all n locations
taatcaacgtagtaacagatgattaaaaaacaatcaacaagattctgaatgtcttggaaaaagtcgttattagccacaaacatttcatgaaattgttatgagaaagaatttaattaagattttttttttcaagaaaaatccaaatttcaaaatttgattagcttgtggattggtcatcatcgtcgctcttctctttgtgaataatatagatataacacgagacgctaagagcagctgcgcctaaggcgattcctctgaagacatcgaaatgatcgtgcgtgttatataaaaaagccactagaagcgacacgatcggccacgtacagacactgatcacgttcgagaacacggcggagacagcgaacactagccccacgatcccgacccagtagatctgccatgcaacggcttgacccaccatagtcctcacgtaggcaatatctcccttcgtgaacgtntccatctctttcttcatatcgtgatngttcacagagattaaacggctgcgactangatgatggtacgacgagagacaagaagatg

SEQ ID NO: 26218 - DNA, 554 bp, Arabidopsis thaliana
gttcctcccgctccaccaactcttcctggggctggaatgtttcccaacatgtttccattgccgactggacaggtctgtggtctttcccttttaatattttcttaattgatgtctttcttgaactaagtcgtctatgtcctacagtcatttgggggactctctatgatgccaattcaggctatgacacagcaggttagattttatttatcatggatatacgcaagatactatgtatttctctgttctaatttaatccttatttactttgtgtcttcaggcaactagacatgctcgcagagtctatgtcggtgggcttcccctacggcaaatgaacaggttattatccactttcttttttcattttctcccactgaaatatgtttcagcaaataatgatactaacattgatttattattttgtatttgcagtctgtggctacattttttagtcaagttatggctgctgttggtggaaacactgctggtccaggtacataatcctggtgcagatgctagagtgtctattatgatacttggattaatctttttttata

SEQ ID NO: 26219 - DNA, 438 bp, Arabidopsis thaliana columbia
gtcatccctataagtcacagcgcaagatgagatgccttcattcaatatggaattgtcgctggcgttcaggccatgcaggattctggccttgaaataacggaagagaacgcaacccgcattggtgccgcaattggctccgggattggcggcctcggactgatcgaagaaaaccacacatctctgatgaacggtggtccacgtaagatcagcccattcttcgttccgtcaacgattgtgaacatggtggcaggtcatctgactatcatgtatggcctgcgtggcccgagcatctctatcgcgactgcctgtacttccggcgtgcacaacattggccatgctgcgcgtattatcgcgtatggcgatgctgacgtgatggttgcaggtggcgcagagaaagccagtacgccgctggcgcttggtggtcttggcgcggcacgt

SEQ ID NO: 26220 - DNA, 1440 bp, Arabidopsis thaliana
agacttcttgatgatgcctctgtacatacacacattttatgttccttaataattaaaaaaaaaaaaatcagcttttagtgcaagaaacaggtctcactctaacatattatgctaacaagtcatcatcaatcacgccttcgatttgctaacatatagtgttatgaattgaataacttggagttaagatatcaaaatgaattttgaaaggacattatgaaatatgaaactaaaataatgacttgtatatttgaatcgcactctaattctccctttcaagtaaatatcaacgtcgaaacaaaaggtatgaaaaaccaataggaagcaccaaaaacaggtgttttcatctatctttagatatgagagtgagagttgcgtttatagcattgcggttagttttggacacagcttgctttagcgttacggttggagacgctctaacacttcgtcgctgctgctcaatgacaagctcgctcgcaaaccactctattttctctgaattgctcatttctcctatccttttgcttccgaacaaaaccgactccacattgttttgcttcaacatctcatcagctatctccgtcagtttcttcacattctctgctcttggatccgtgtccacgttcggtccacaagctcctaatcgcgatccatttgcctgctgcaccacaatttatttctctaatgattttttcatccaaaaaacgccaaaacatacaacgttgtctccaatcatgataaaaaagaaaaaaaacctgaatgcgaacgtaattactacttcggtaaggcccaaagcccatagcaacagcttgatcaacaaactcagcagacccatcaccagagattctcgccatgggccgagcccattccttaacgcgccaattcttaacctgttcataatcataattcacttcaaaaagctgaccagtcccaagcgacaacaccaacaaatcctccactcctttcaccgccgggaactcctgtttgttatgaaacacgtgcgttatcgccgccgccgtcggattactcatcgctaatccaccccccaccgcaacgcaccgcgttttcccgtcgacggaacacgtgcgaaccggatcaaacgtccccggctccgccatgtggcacggcaaatatctcggagacgaaaatcgaaactgtcgctttcttaagcgtcggcgcgtgagaataagaaacggagccgtgtttgagagatcgtagcaagagatgagaattgttttcagtgtgtctttaagcgttagaatcgccgaatgacgctttcgattgctttttctagcttcgccgttgcggcggttactgaagatgatccggatccggatccagatcttatgacccgtttaatcgccgctcctgctcctcctcactcacttccgctccctgatctgtagaatccttctgcgttctctacgagaaattccaagtgtc

SEQ ID NO: 26221 - DNA, 589 bp, Arabidopsis thaliana columbia
catcaacaattctgaaaagatagcggggtccagccagaccagaagggtcattcacaaatcttagaagtttgatgtcggaatgtgatttgtatgaccttaaatactcaggcaacttcatgtcttggcggggaagaaggcatagcacttagtgagatgtcgcctggatagagctatgtcaaatagctcttgggtggaagcttacccatcagggagatctgaatatttgagatttgaaggctcggatcatcgtcctattgtcacctcctttgatcctgtaagacgaaacaaaaaggattgtttagatatgatcgtcgcttaagagataatgaggacgttaaaagactagtgttgtctgcctggaatctaaatcagctagactcagttgagaagagattaagtagatgtcgatctgcaatcattgaatggaataaagagcagcacaataacagtaagaaaaaatattgaagagctgcagatgaaacttgaagaagctttgtcttcacaagacttagcagcagagtgtgtggagctgattagtaaagaattaagcttagcttaccaagcagaggaagagttctggaaacagaga

SEQ ID NO: 26222 - DNA, 537 bp, Arabidopsis thaliana columbia
gcgcattgttgtatacggtgactgcaccatcccttgtttggtaagaaatatatttctcacatctctgccaattttcttagttcttgatttcattggcagagtgaattcgtctcagtacaataaacactagaatgattcttcacgtgtcgcacatccttgtcattttttcttggtttttgatgtctatatttattcttttctccctactcaggatacactaaagcgagctgtgaaagctggggatggtacgatacttgcaacggcgcctccttacacgcgtttcttgaatcaaaacacggatttcgcgttgataagccccgggatgccgcgggatgacgtctggatccaagagtttatacgccacgaaatcccgtgtgtcctctccgattacctggtggagtacgtttgtaaacccggatacgcacttgacaagcatgtgctctacaacacgaactcatgggcagaaaagtcgtttaacaagatgcagcttagagcagatttgtgtgtgtaccattaacttaaagtagatgaataaat

SEQ ID NO: 26223 - DNA, 566 bp, Arabidopsis thaliana columbia
  unsure (1)..(566): unsure at all n locations
gatatctagagcgtacttttaccgctccgcataagtggatgagaggcaaaggacgagttactattcaattcggatgttgttataactatgcaccggtaagtgactctttcctcatctttaaaaatgaaaacattttatcaactatagtgaatatggaaagagttttttgttttttggataggacaaagcgggaaacccacccggaatccttcaacgtggagatgttgatccaatgccatctattttcaaagtaataatcaaaaggttggttgggtggcatgtacttcctccaacttgtgtaccggatagttgtatcgtcaatatctatgaggaagacgattgcatacctcctcacatcgataaccatgacttcctccgccctttctgcacagtatcattcctcagtgaatgcaatatactctttggttcaaatctcaaagtcttaggacctggtgaattctccggttcttactctataccgcttcctgtcgggtaaatcctanagtttgcgtacctctctgagtttatctactgaacttctgttgcttactttttgacgagttttc

SEQ ID NO: 26224 - DNA, 528 bp, Arabidopsis thaliana columbia
aaagaactcatttctcagaaacagacgcttttcgtcttcacgaagttgcttaaatgcttcatcgtcagcaagctcctgccgtcgggtctggatagcaaaataagtctgccctgccgcaatgaccggtttcgcagggtcgccgttttgtactaccaggtaacaggcatagcgggagagtacgatgtcttttaatgctcttttggcatttgagccaattttgaccatatcgaggatctcctcgaaatggtcatcaattgtgtgaccactgttctcacaggcttctttggcgcgcgttaatacaggtataaagtgacgatactctgaataacccagtagtttcccaagttgtcttgctgaccattgttctgctccgtttgcattaatcagttttatctcttcaaaaggttgatgatgttcgttcattgcccactccatgtgatatcaattgcaaagaaagtaaatctgtaactgtatttatatacagttgtgagtatccacgttctcagtgtgctgggcaaaaaaacatcg

SEQ ID NO: 26225 - DNA, 434 bp, Arabidopsis thaliana columbia
ttttataaattttcttttgttagtttttaaaattttagtttgttcattaaatttatagattcttcttctcctgatttgtgttttttgatctttcagcatgctcaagacactggaaaggtatcagaagtgtagctatggctccattgaagtcaacaacaaacctgctaaagagcttgaggtttaatctccaacatctcttcgatcttaattatttatccttttttaattttatctaaagaaaatgtttgattttgagacaaaagcccttcaaagtttcttacatagatattcaattgtctattatcttcgcaattttcagaacagctacagagagtacttgaagctgaaaggtagatatgaaaatctgcaacgtcagcagaggtatatacattaatgtggatgatgatcatttataaacagcatatatatatata

SEQ ID NO: 26226 - DNA, 567 bp, Arabidopsis thaliana
ttctaggttcctagagtatttagacaagggaagggttgagaaagtagatttgtatgagaatgggactatagctattgtggaggccgtttctcctgagttgggtaaccggattcagcgtgtacgtgtgcagctacctggattgagtcaggagcttctccagaagttgagggctaagaatattgatttcgcagcacataatgctcaggaggaccaaggttctccaatactcaacttgattgggaatcttgcattccctgttattttgattggcggtttgttccttctctcgagaagatcctctggtggaatgggtggccctggtggtcctggcttcccactccaaattggtcagtcgaaagcaaagtttcagatggaaccaaacactggtgtaacttttgatgatgttgctggagtcgatgaagccaagcaagatttcatggaagtggtggagtttctgaagaagcctgagaggttcctgcggttggtgccggatccaaaaggtgtcttcttgttggtctcctggtaccgggaaaacctgttggaaaagcattgctggtgaactggtgt

SEQ ID NO: 26227 - DNA, 608 bp, Arabidopsis thaliana columbia
  unsure (1)..(608): unsure at all n locations
ctnnnnnnnnnnnnnnnnnnnnnnnctaaagatgcatatatagttcctgaatctgtaagtctgttagttataggttactgtaaatgtggctggtgcagaaaacttacccgcagtgacattgtttacggttttatttttttccacgaccaggcgtgcactcatcggataataaacgaccgcattggctgcagtggagattgttacctcttgtgatgctggtgttacacagctaaattgtgttgcactccctgttgccggagttacagtgctccagacttcaacggcgacacatcttgctttatctgcggctgtggaaccatttgcaaaccccgcaccgtcattagcagttccctcgcatgtggctcgcttggttaattttatttgcgcttttttattggggataccgcacagtctttgaatttgagtttgaatgtttttactttggtcttggcattgatttcagaaatatatacatcaccaaaatcaacaacagaaatgtcctgatcagagtcatttactaatgtagcggtacaagtctccatttctacagtagtaataacggtcagtcaatactgtctgttccgcataagagagtacgctgacaatga

SEQ ID NO: 26228 - DNA, 971 bp, Arabidopsis thaliana
actctccagctagccactatattaaccaaacagaattaagtgatcatgaatattggaaaccttaattataagagagagctttttacttaccatctctaatggtggttgaccgtcagcaaagagagcaacgacggcaagggtcatggctacatcaggcattttgttcatgttgacatcaatagcccgcaagtgtctcattccaaaagcatctctaggtggtcctgtcacagtcacactgttctctgtccaggacactttacatcccattttctcaaggacctcggcgaattttacatctccctagagattcatcacaaaaattgagcttagattcttgcgaatatgttatatacaacttgtcaaaagatgaaactttgacctagacgaatttcactataaacttaacagcctcgtcgatgattcagtgtacaaatattacctgcaagctggtagttccacaaccttcgactgtgacagtttcaccggtaatggcagcaccagccaagaaataactagcactagaagcatcaccttctacatacgcattacccggagacctgaatcattcaccttttagtcattatattgtcaagctaagggatgtgatttcagaaaaggaagaaaagaataactcctacttgtatttttgcccgcccttgacaaagaaacgatcccagctatcactatgctcgacactaaccccgaaacgttccatcaacttcaatgtcatttcaacatatggaacagaaattaatttatcgacaatctcaatctcgacgtctccaagagctaagggagcagacatgagcagagcagtcaagtactgactactaattgatccagaaagcttcacctgcaaatgcataacatgtctcctaattgttaatcaagaaatcatacaacgaaaacggtaatcgagaacgaaaaccaatcaccaaatccgattctattttaggatcatccgttgagag

SEQ ID NO: 26229 - DNA, 529 bp, Arabidopsis thaliana columbia
ctttttctgtctctctttcaccttttcttctccatcgatcttacctccacggaacttcttatttaaatcaaaaaaattcagaatcttttaatctcacgcaggcaaatgtctcgtaatttaatctatagaagaaacagagctctctgttttgttttaatcttgttctgcttcccttaccggtttggcgctagaaacacgccggagagagcaatccacagcaaaagcaactcaaataatacacgtcagcaattccacgtggcatgatttctctcgtcttgtagatgtccaaataggtagccacgtcagcggcgtatcagagctcaaaagatacctccaccgattcggttacgtcaatgatggctccgaaatattttccgacgtgttcgatggtcctctggaatcggcaatctctctgtatcaagaaaatctcggtttaccaataaccggaagactcgacacgagtacagttactctcatgtcgttaccgcgatgtggcgttcgcatacgcacatgaccatcaacaacgatt

SEQ ID NO: 26230 - DNA, 545 bp, Arabidopsis thaliana columbia
ccaacatagtatcctgtttaatttagtttaaacaagttgatgccgcccgtaatcatgtgtcattaatgtccttttttgagtttttttgtgggttaacaaataatgtgggtaatgggtttggtagggcgataacaatgtagcgactggtgttagtccaccaccacaagttgtttatgaagataacgtagaggttagcatctatgttgattacggattaacaattatcatactgagtagcaaattttttgtcgctttttcacgacaattgtaattgatgtaaatcgtcggtaggtctctaaccacgattccgtccaagacgacctcgcacccgaagtgaatgttaacgtggaaggggatgttaatgaggttagattattaatcaaatattgattttctaattttttcttttctagatttgatgagttttgtcaacattgagtttacattgtgtggaccattttttctgttaatgtttaaagcggcctgatattacgcagtaactgaagtagcacggccccaaacattcgggtgacaatgaggaggtt

SEQ ID NO: 26231 - DNA, 448 bp, Arabidopsis thaliana columbia
  unsure (1)..(448): unsure at all n locations
nnnnnnnnnnnnnnnnnnnnnnctaaagctgatagtcagggtattcgccagcaatggttttatcggaaagcggtttcccttctttcgcttccagtttttccagcagttcgccgtcccacaccagatccagcggtttattgctggtgattttggtttccagtagtgacgtgcgcggcgtggcgaacggcagagtcatttcgacttgcacatcttttgctgtcagtttttgcaccagcgcaccgggaatactgtatgcctccagcgtaaagtcgactttcttgccggcctgccagacggtcaggcggtcgaaattgctggccataaagttgatgtactcttccgtcagcagcgcaacgccctggaaagccgcccatggctgttagggccgtctggcaacagatgaccatgccaggctccgagatcgaaaaacggattaaaacgctggtga

SEQ ID NO: 26232 - DNA, 620 bp, Arabidopsis thaliana columbia
gacacctcttactagtattagtcccaagaagacatgggaaggaactattgtaggacttgttggttgtatagccattaccatattactctctaaatatctcagttggccacaatctctgttcaggtacttagagatttcatttcgttctatcgaaactcggtttttcgtgatctctctgtttctgaattagttcatttgttttctcagctcagtagcttttgggtttcttaacttctttgggtcagtctttggtgatcttactgaatcaatgatcaagcgtgatgctggcgtcaaagactctggttcacttatcccaggacacggtaaagtcacccctaactaatccataaatcaacgccgttcttctcactcccgctacctctaacttccttctcatgcttgcaggtggaatattagatagagttgatagttacattttcaccggcgcattagcttattcattcatcaaaacatccctaaaactttacggagtttgatgatctacggaaagccatatctttaggaaacgtcaagcataccatggtaagatcggcaatgtagctgtgaacaaatggtgcagtgtctctgttggacctttgaaagatcagaggattgaaggt

SEQ ID NO: 26233 - DNA, 456 bp, Arabidopsis thaliana columbia
agaacttcaaattgaattccagtaatatgtaaccgattttaataaatgttttggtttcactatttgtgttttaataataataataatgaagtagcaagccacacaactgatgaaactaaaatttgggctttttttttcctggaatatttcatcctctgctttgaaactctcgtttaatccaatcatatattttattccaatttgttagtttttattcaatccatttgtttccttttccatttcggaaagctcaatgattttcagtaacaatgaaaccaaaaaaaaaaaaatggaaaacagagcaagcaagaaacagagtatataagggggattcaactgaattaagcttcccaaccacgcaactgggtggctcgagcgactcggttaactccaagagtgaaagctcccatcggaggttgcaagaatgagtatggcacattgtcttgatgttgtgaa

SEQ ID NO: 26234 - DNA, 470 bp, Arabidopsis thaliana columbia
tatttacctgataaccattgcatttgatgagctcctttaatctatcaacaacaaagacaaacccatcaccgtcaatgtaacacaaatctccagttttcaaccatccttctgaatcaatggtagaagcagtagcttctttattcttgaaataacctataaacaactcaacaagtttgagacaacaccaataacaaaaaaaaaaaacatatttcacaggcatatgaactaaagatcaagaatcaaacacctttcatcacagtaggacttcgaatccacagctcacccgtttgattcacacccaaaacccgacccgtatccggatccacaatcttaccttccacattcggagccagtaagccagaagctccatacctcttagtctcctctttattaaacatagaagcagctatagccgttgactcagtcaaaccatacccttgtaggatcttaaccttgggataattctcaac

SEQ ID NO: 26235 - DNA, 527 bp, Arabidopsis thaliana columbia
tgttgggctttttatgtgtgctctagtagtattgtcgtttgtttgtatttgtactatgactcatcctcttgttcatcggatctaaagcgccactcaaaagggtttatgaaaaggttagggttttaacaacaactcaaaaaacagagatggatttcgagaagagaaaagctgcgacacttgcttcaattcgttcatcagtgactgataaatctcccaaaggttttctcgacgaacccatcatccctctcctcgaaaccatcaatcatcacccatcttacttcactaccagttcctgctcaggtcgaatctcaatcctttctcaacccaaaccaaaatcgaatgattcaactaagaagaaagctcgtggcggttcatggctctatatcacacacgacccagctgattcggatttggtaatttctctccttttcccttccaagtcaaatcagattgacccaattgaccaacctagcgaattagtcttccgattcgagccgttgatcattgctgtcgaatgtaaggatttg

SEQ ID NO: 26236 - DNA, 477 bp, Arabidopsis thaliana columbia
attaataatatgacagatcaacgtaccacataaatccctgagggtatccaggagctttatctgaaagaacatctctgcttcatcgaccgaagcgataggcttagaacaaaactctgaaccccaaatttctgaaacgatcccaagatattcgttttcagcatcttcctgatctgtcaactgagcatccccagtatcctcttccaaaaagatatttgtatcagaacctagcccaccaatgaccatatcactagccaattcttccaaaacagccatctcagatgtctttaaacgcttttttctatctactaatccaatatccaactctgcttttctcttcaaagatagcttttgagacacctttagtacggtccataacacctggaaatctgggaaaaaactttatcactcacctatgatatccgctcaagagaagcctgaatttgggtaacagagcaaagtttcaagcagtaacaaaag

SEQ ID NO: 26237 - DNA, 449 bp, Arabidopsis thaliana columbia
gtgccgaggctaatatgacagatcaggaagatgctgaaaaagaatatcttgggattgtttcagatatttggatttcagagctttgttctaaccctattgattcggtcgaagaagcagagatgtgttttcacataaagcttctggatgccctcaagatttatgtggtacgttgatttttcttattgttattttcgtttgtgttgttggaaaaaaagccgaaccttcacaaaaaagttattagtttaaatatctagcttaatgattatagctagtgacaggatgtcttattgttttgcactgtcctttaaaattttccttgtcaaatattagttttgaagtccttgcaatgtataccaattgaagtttgatttttgagttgtagtggtttgtccagttgagttgacagctagagaactggaaacgttcatgcgttgcttacccagttttgg

SEQ ID NO: 26238 - DNA, 550 bp, Arabidopsis thaliana
taagaagaacacctttcgggatcttggcaccaaccgcagtgaatctctcaggtttcttcaaaaactccaccacttccatgaaatcttgctttgcttcatcaactccagcaacatcatcaaatgttacaccagtgttaggttccatttggaactttgctttggactgaccaaactgaagtgggttaccaggaccaccaggtccacccattccaccaccagaccgtctcgaaagaaggaacaaaccaccaatcaaaagcgccgggaaagcaagattaccaatcaagttgaataacacagaaccttgatcttcctgagcattatgtgctgcaaaatcaatattcttagccctaagcttctgtagaagctcttgacttaaacccggtagctgaacacgtactctctcaacccggttacccaattcaggagaaacagcttccacaatagctatagtcccattctcatacaaatcaactttattcacctatccttaccaagtactctagaacctagaatcgacatcctcgcgaagaacaccttgttcacagcattt

SEQ ID NO: 26239 - DNA, 844 bp, Arabidopsis thaliana
catggcagctcccttagctcttggagacgtcgaaattgaaattgtcgataaattgatttctgttccgtatgttgaaatgacattgaagttgatggaacgttttggggtaagtgctgagcatagtgaaagctgggatcgtttctttgttaagggtgggcaaaaatacaagtaagagttattattctcttccttttctgaaatcacataccttagattgacaaaataatgactaatatgggaaatgattcaggtcgccgggtaatgcttacgtagaaggtgatgcttctagtgctagttatttcctggctggtgctgccattaccggtgaaactgtcactgttgaaggttgtggaacgaccagtttgcaggtaatatttgtacactgaatcatcaaagaggctgttaagtttatagtgaaattcgtttaggtcaaagtttcatctttttaaggctttgacaagttgtatgtaacatattcgcaagaatctaagttcaatttttgtgatgaatctctagggagatgtgaaatttgccgaggttcttgagaaaatgggatgtaaagtgtcctggacagagaacagtgtgactgtgacagggccgtctagagatgcttgtggaatgagacacttgcgggctattgatgtcaagatgaacaaaatgcctgatgtagcaatgactcttgccgtcgttgctctctttgccgatggtccatacaccagttagagatggtaagtaaaaagctctcgcttataatagaaggtttctcaagattcatggtcagttaattctatttggtcaatatagtggcgtgctggagatgtaaaggagacggaaagggatgatt

SEQ ID NO: 26240 - DNA, 539 bp, Arabidopsis thaliana columbia
tggtttaagttttagatatttaaggtgtaactttaatattattttaagccttttgcaaaaaaaaaaaaaaacttttattttcttttgtgttacgaatttaggatgatctcagcttgggccgaggtgcatatgtgcatttgatgatgttgtgttctctccttagactaagaatcaaactaaactcaaatgtcttacaaaagaaaactataacactctcttctcgttagaagctctactcttttccatctcttaagaacctattataggcagagattccactgaaatagtcgccaaactccatgactaaatctacatgattctgaagaagtgaaacgacctgcaaagttaacaaatcaaatcaaaccaaagaactaagagagtgaaacatacaacacaaattgtcccaccaagaacactacctcctgatacgcctcatctttggacttgtttcctcactgtacattttcaatatctggagaactgagttaactacatgactaccatagccctgaaaccttgcctgcacatggacaattttg

SEQ ID NO: 26241 - DNA, 556 bp, Arabidopsis thaliana columbia
ataccaggactgttagaatcatatctcatttgtttgcatcacaccggattggattgacatcctaaaatactacaacgacaagatagtattttaggattaattgactaaaaacctactatcaccggccatagggcgattcaggggcgttacactcagaggaaggggtgatgcggttgctaggtcactccttcttcttaaacgtactccagattggcggattctctgaaagctgaatgagtcccaagcgaacggaccgttgtagaacgcaccaaagtgttgagcaaaagtgtgcaacagtctggaggcataacactgttcgaattacgtttgggcatagctgggggagggctactccgagttcgtgcattagctcgatgaagatttctggaaggggaaagtacagtccgcactccgaaaagaagatttcaaaggcgaattagtgccctgaaggaggagtttctggagtctcttttgccttcatgggtaccaacgtaacgtctttagggatctcgcatcccctctcactaaaaggaattttctcgacgtaaggattgac

SEQ ID NO: 26242 - DNA, 611 bp, Arabidopsis thaliana columbia
ccaatccgagtgatcttctcccaaaccaaatgcttatcactaaaagccgggtttccataaacgcaggaaacataaaattcatgagaaccaaattggatttgaaaatcaataagattcttgtctgcatactttatcacaatgtcaactcctttcttccaaaacaaagccaatcctccactaaggccaatcgggttcacagtaaaaactctttcatacccttaaccattcttgcaggtctactactacattactacaattcttggtttccattaagaacaaaacctcaggaaaatgagaaagtctcatctccatgagtctcggaatcgtcaagtcctgagaccatcctagtccttggcaattccagctaacaagactcattaggctttggacgggtcctcatttgggaccaccaatttagggttgagcttgaagattttcgcagcgctcggacccatgtcaactgcctttctcttgtcttttgttccagaggtagaaccttcctttaggctatgatccacaaagatggaagatggatctttcagcttgagtttcctagcatgcttagggggtctgtttctttgctttacctttttcgggatagtccgagtaga

SEQ ID NO: 26243 - DNA, 508 bp, Arabidopsis thaliana columbia
cactaattgtgcagaaaaattgtcaaaacgaattaaaaacattttcctttgggtcgtttacttgtgatgtgatcaaatcttgtaaaccggagtgattccaagaaggtggaagcatttccgcatgactatggccgttgcttcacaaagtaggagacggcttgtctcctctggtgaaccattgacctgtaaaagatcatgttttcagtgagatcaacatgagagtggttgattatgcagctatgcagtctaatatcacaatatcaaatgagaaatgtagagtcttgtgaattgcacacctgacaattggagtagaatctggtaaagtgttcagataaattgtagaggtactcgcacagaacactcggtaataagttggtacaagcttccatccaccgtctgcaaattgttcacacatgagtttcaagttcatcttgttgccgagaagaagaagccaaatatgatagaagtatctaaagagagcatgtggtactcagcaaatcgaagcaag

SEQ ID NO: 26244 - DNA, 890 bp, Arabidopsis thaliana
atctcaatctctctatataaaatgtacatatttttttacttttatatgttcaaaaatattcatgtaacaaacaaaaaaaacctatcatactatttatcaacgtactatcaatgaaataaaatcgttaaagaggttttatatagctccataaatatacccaattaacttgtgattctaccttcattgatcacttcagaaagacacaattagtaacttttaggtatgtgtaaatatattaagaggatgtatatgaaataacttacgggtgaagaaagtgttcaaagagccaagctctcaacgttgtgactgcgcgttcaggcaagccgcgttgtggacgccaaggatgagcgtcaacaagagtcatttggcgatacgatttctgttgccgcaaagcttgatcgagcaatctcaaccgtggagtttctccacgtgctgcaatagaaaccgcacgattatcctcttctctctctcccaaagcttgacttgttgcttgaatctgtcccacaagtccgtcttttaaacaccgaaagtgtcttgacattgcccttgacgctaacgcagtgtatatctctgcccctcctagtccaaccgccgcttcaaaggctgccgccgcaactctcatttgcactcggtaatgtccatatcttcttttaagctgccaaaaaaccgcacaaaaacgttaccccacaccattcacaaagatttcactcacaatcgtgtaaacgcagattcttagaatgaataaatatacgaaaacgacacaactcgttatggcttatgatgatgaaactgattgctataaatatggaggaccactagagtctccagattagctcaaagcaagggaaacgcaattatatagtggttctctaggagtaaagaagtcatga

SEQ ID NO: 26245 - DNA, 578 bp, Arabidopsis thaliana
tgatacctttcctggaatattgtccaaataaactaaccattattcatagattttaacatgagattatatgagaaaacagctgcatgcatgaaagattatatgataagaataattgaataaaataccagcaatattaaaatttcaacaagagccatctgcacgttgaagttggcctcaggctcgtttctgtatcgcatgtttgcgtcacgaaggagctgcaccgcctcttcacattttccttccttcatcttccgtaccgcctccatctatatttcccacaattttaatttcattgagttttttttttcatttaaactgatttgaatatatgtatatatgaaggtaaataccgaatttaaataagaggaagtaacatatataagacaagcaaaaccgaataatccagctgtttgtagtggttcaacaatactcctagctagtcttaaaggatcaagatctcaagtgacactaaactatttgaacaaatatttatatgtttgcagattgtaccttgatggagtcaatatcgtcctctgaaggcagagaagggagcttgtgaagattgaatggtttttgag

SEQ ID NO: 26246 - DNA, 524 bp, Arabidopsis thaliana
ttcaaacttcgtgttgagtgaatcctgctcctctttgctaagttgatccaccagcggtttttctaacacaggcattttacgctttggctgagtgggctggaccattccatcactaggagacagaggcactggcctcggaggctttcctttgggaccagctggtggccttaagcccccaggatgtggttgctgttggaaccctacaatatttggtacatatgaatttatctagtgtaacggaaaaaaaggtaagtaatacagtatgtgcaattgaataccttgaggatgtccccaggatgcattgccatgtggtgccacagattgaccaggagaggtgaacatgctctcactatgtattatagagcttgggaacactgggggaagtggtcggccctctctgtaacgctccataagatagaccgcaatacagaactcccgcaaggagagcatgctgtcattatcttgatcagataaatcccatacctgcttcaaagcgtctgtacaccaaggaccagcatgagaca

SEQ ID NO: 26247 - DNA, 531 bp, Arabidopsis thaliana
aaatccatggttcaataagaccctcccccaagccaccctgttgtaacacagttgcacgtcgtcaattcgttgacttttggaagccaaactctctagatattacaaggcgtcattaactacatcaatatctcatttctttggtcaaaattcaggcatcaatcatctatctctccactatcgataatcatggcttcttcttcctcctcatcagagcataaagtgttcctgagttttagaagagaggacaccggtagaacttttgtcagccatctataccgttcgttggatcaaaaagaaattcgaacttacaaatttgaaaaccagcaggcgggagacggaaagaggatatcttctgaggtcaagcaggctatcaacgagtctaggattgctgtcgttgtgatatcggagaactacgtctcttccgtcttgtgcttggacgtactcgcgaagataattgagcgtttgctctcatcaaaatcgaaacagtcttctacgaagtggatccgggggatttgacaagaccaactggta

SEQ ID NO: 26248 - DNA, 519 bp, Arabidopsis thaliana
tcaagatttattaagaataattctcttttttagctttagaaaataactcaaaactaaagttctcaaccttaacgcttaaaatcatgaggaataccacactttggtatctctcttttataagagaaggattagacaattttctaatctctttagcagaacttagatatatgtatttaggcaatttcctaaatataatgtttaaacctaattaccttttttcttgaataccttcttcttcaagtaagcttcaaacttactccaacattctccccttgaacttcattcttccaagagtctttgttaaaatgcctgccttctgctcattcccagggatatgttcaacttccacttgactactctcaacacactctttatgaaatgatatcttctatgtatatgtttacttcggccatgaacaacatggtttttggtaagagcaatggcggatttaatatcgatacgaatgagagtttcatatgttaacccgtaacttcactaagcaaattctggagccaaata

SEQ ID NO: 26249 - DNA, 1457 bp, Arabidopsis thaliana columbia
ttcatcacttatcagcgatttgacgagaagagctttttggtttctgcgaatcatccaaaatccgccatggaagcaactacaagaatcttgagtacttcttctgctctcaatcgtcttcttcttctcagtaagctcaatctaaaatcagatccccgtaatatcaattccacaaatcagctactacacaatgccgttacccgaaaatcctctatctccgccgctcgtatacggtgctcttcgctccctgcgaatgcgaatctcttcagatcactcttcttcctaacgtcaacgtttcgtctcgagaacaccgccgttcacgctaatccattccgatccgaacctaacgacggcgtcgccgtctggaacagagctccacggatcgtgaacggaggtggaaacgcggcgatattcggcgggaacgaggggaaagagacgacggtggttctccttggttggctaggagcgaaactaaacatctaaggagatacgttgagtggtacaactccaggggaattaacgccgttactttcactgttgacgttagggatttgctccggttagatcttggtcggcggcttgaacgaaggatagctgaatttgggaatgaattggttaattgggtatcggagaaagaagatgatggtagagagaaatgcttggtgtttcacagtttcagtaacactggttggcttgtgtaggttgatgaaaccaaaatccttcaaaatcctacattgtgattgcgattgtgatttagtgttgatttgaattagatgatgaattttaagcatggtgggcttttttacttttggtagatatggtgccttgctagagagcttcattggtagacaagatttagtagaaaggattaagggttgtatcattgactcgggaggagcagatcctcttgatactaaggtttgttctctctttcatgtaaccaagagttttaaatgctattcaatggtttctccactgcttcaagatcttgtattggaagtggaaatgtcaatattgttgtgaagtgaaaaattctatttgagctatgttgtcctctttttcaataatgattcattttatgctagtgtgaaagctttgctagtttgagttctatgttgaagaactttgtatcgattacaagcatttgcagaaccatggctaggggacttttgattttgatatctaagcaattagctttgtagatagataactcagtacttagaaaagactatatagctatgagttaaaaccgctgatttcttttggttacgtagccatcactcacaggtttatagtacatcggcctatatatcttgtgaatgtgatcttgttctcttgcaagatatgatgtcttaggcatgtgaacaagataaaatgagcttcatagtatgtgcctgagtttgttctgaagccccttttgttgaaaattgcttaatcattgcgtagtcctaataagccag

SEQ ID NO: 26250 - DNA, 478 bp, Arabidopsis thaliana columbia
tcccccagtagacaatcttcttcttttcactgtggaatcttattcgaacgtttctaaaagaagcaaacgagatgtttgagatgtatatatacacaatgaacgatagatgttacgctagagagatggctaagttgttagatcctaaaggaaagtatttcagcgatcgaattatttctcgtgatgatcgtacggtgagacataagaagaatcttgatgtttttgatgggaaacgaagaagcagaagctgttcttattgtcgatgactcgaagaatgtttggttagagattgagagaaatcacttctttgcttcaagctgcaaacagtttaaggaagattccaaatcgctgtcggagttaaagatggacgagagcgaattcgatgtatcacttagtactgttattaacgttttgaagctaactaatcacatattttttgaagacacaagtagagatgtgagatcagtactgaaacaagtgc

SEQ ID NO: 26251 - DNA, 570 bp, Arabidopsis thaliana columbia
ttgaggaggctcttgatgttgatgaccttgaagctgataggaagcctgaggatttacagctaagtattgtcagtggggagaagggaaaagataggtctgaccgtgagttggtcaccccatggtttaagtttctgtgggagacatacaggacagtccttgagatattgcgaaacaactcaaagttggaagcactttatgcggtttgttttcttctaggttaagcttattggtgatacctctgattttaagttgattgagattgaagacttgtactttataatcttgtagatgacagcacataaagccttccagttctgtaagcagtacaagcgaacaacagagttccgtaggctttgtgaaattataagaaatcatttggcaaacctgaacaagtacagagaccaaagggaccgacctgacttatcagcccctgagagcttgcagctgtatctggacacaaggtttgatcagttgaaagttgctactgagcttggactttggcaggtgcgtttttgttttctatgtgtattttctgatgctacttctctatccatatttagtttggctgta

SEQ ID NO: 26252 - DNA, 581 bp, Arabidopsis thaliana columbia
ccttctgcaatagggttgcacaacaggaagcccaagaggggtgatccatcgcactggatgattatcggaagcaattatctgtaaaattgacaagtcaaaaagaaaacactagtaagtctctatttactaaacgtagaagagcagagttaataaacatgctacaagaccacacctttgcacaatcaccaagccaactcataatggcacgtgccgcttcaaatatctctccaagggcagctagcgtcacctgaggagaaatgtttcaagtataacattagtacatagctaaaaacaaaataacatttatccgcgtgaatgccactattcttcttacttttgcagaatagcaagcagcagcaaataacattctctcgtcagtgataacacctttctcttctaatcttctttttatttgttcacgagcccctacataggtgacaccatatactgacgtcattaccgtctgctttaccagcttcctgtcgacctgaaattagaagaaaacattgcatcactgggaagaacttttgctgtggcataatgttcaatcaaaaaccgttgatactcacttgagtgataag

SEQ ID NO: 26253 - DNA, 559 bp, Arabidopsis thaliana columbia
tgagaggttcgctagtcgttctgagtaaccaatcaaatttcagatgtttttatccataacgtttgtcactttaatatgtatccacaaaccaatattctcgatttattcaagattttatagaaaaaaattggaaatgaggagttttgttggctagtgtggccaaccataatttcattggattaatggcaaattctacaactaaactatgtgaaattaacaatatcaaacctcaagagagagcagcaatataataagaaaaagtgaagatacggtttacatattatttagtaacgactatatcaaggacataggaataacagataatacttggaatgtttatcaattattatctagttaataacagtgagtcgacttggttttttccacaaggacccttttgccttatcagagaacggtactcgtcgaacctgattggtttataaagagcaggtcggtttgcagtgactagttcttcgattggtccaacggggatatcacttctcgggttatagaagaatgcatagagactcgttcataccggaattacgatcactgatgt

SEQ ID NO: 26254 - DNA, 420 bp, Arabidopsis thaliana
ggtcgactctcccctgcagtacagacaatgcctaagagtcttcattgcttgtcaatgcgactaactgtggaacatttcaagtcagattcacttgaggatcccattagtgagaaattttcagatccctcattacttcactttgttatcatctccgataatatactagcatcgtccgttgtgatcaactcaacggttgtacatgcaagggtgcgtcttaaatccagttttctttacttagtattttttttcatgcagtcatagaactctgatttctaattcttggttggttattgatgtttcaggacagtaaaaactttgttttccatgtactgacagacgagcagaattactttgcaatgaaacaatggtttattaggaatccttgcaaacaatcaactgttcaagtattgaacattgaaa

SEQ ID NO: 26255 - DNA, 544 bp, Arabidopsis thaliana columbia
gactcaaccactgatatcaagcaagcaacgcaaatccctgtggtaatgatcgacaagccattaatgacaatgacgcttgcagacctaaaggctgcgactttcaacttcgacagaggcacaatgttgtgggaaggcaagtctggtcctacttacggagcagtcttacccggtggattcagagcagctctaaaagttatcccaagtggaaccacattgactgatactgaagtctcgattgcatttgaacgtctcgctaggatcaatcacccaaatcttttcccgctctgtggatactgtatagcgacagagcaaagaattgcaatctacgaggacttagacatggttaatttgcaaagtctactccataacaacggagatgattctgcaccttggagacttcggcataagatagctttggggacagcgagggcattagctttccttcaccatggctgcattcctccaatggtccacggagaagtgaaggctgcaacaatcttgttagactctagccaggagccacgcttagcagactttggtttag

SEQ ID NO: 26256 - DNA, 579 bp, Arabidopsis thaliana
tatggccatgacgattgtggactgtgatttattgaaggagattcaggcgggatatactactgatggtactttacaagccatcattactgcacttcaacaagatgcttcctctcataagcatttttcttggagtcagaatattttgaggagaaagagtaagattgtggttcctacagattctcaaattaagaatactatcctcaagtggctacatgattcgggtgttggtggtcattctgggagagacgtcactcatcaaagagtcaaagggttattttactggaagggtatgattaaagacattcaagcttacatcagaagttgtggaacttgtcagcaatgcaaaagtgatactgtagcttatcgagggttattatagccattacctattcctgattcaatttggagtgatttttcaatggacttcatcgatggattgcctttgtctaatgggaagacagtgatcatggtggtggtggatcgcttaagtaaggcagctcactttgtggcactttcacatccctatagtgctttgactgtgactcaggcctatttggatacatttcaagctgcatgggt

SEQ ID NO: 26257 - DNA, 420 bp, Arabidopsis thaliana
aaagtgatccaccaccaccctgatcacagtttttccattagacataggcagaccatcgataaagtccatcgagacatcactccaaattgaatccggaataagcaatggttgtaataaccccggataagctgcagtatcactcttgcattgctgacaagtaccacaactcctgatataagcttgaatgtttaatcatgctcttccaataaaacaaccctttaaccctttgatgagtaacatcccttccagaatgaccaccaatgccagaatcatgtaaccacttgaggatattattctgaattttagtgtctgcaggaaccacaatcttactcttcctcctcaaaatattctgactccaagaaacctgctgatgcgatgaagcatcttgttgaagtgcagcaatgatagtttttaaagtat

SEQ ID NO: 26258 - DNA, 500 bp, Arabidopsis thaliana columbia
  unsure (1)..(500): unsure at all n locations
nnnnnnnnnnnnnnnnnnnnnnctaaagccgattaattacgatggggttcatgcgataccaataaataaatgcgtcaacaattcagcacacgaaacagacctgatatacatggttctgctaactgcttcgctgcagtttcagtttaccggtatatggggaccaacgctgtttcgtgtgccgtggaacctggaggtgccaaccttaaacttcgggggaatattctatacacaacgacgggggatgtcgttagccacgggagatttatctcataaataattcacgttgtcgccataacggcgaaacgtgaacgaagatggctattaatggatgccgccaatgcgacttaagcgcagaccagtcggccattcgccttcttgcttatcgaagctcatccagatagccgttgcccgaccgaccagattcgcttccggcacaaagccccagtaacggctgtccgcgctgttgtcgcggttgtcgcccatcatgaagtattgtcccg

SEQ ID NO: 26259 - DNA, 693 bp, Arabidopsis thaliana
cattatctctggaacccgttttaactaaattcccaggaggaagcggctctactttacctgtgcatgatccaccagtgttccacacaccgccttcataatgatcaggcgaccaagtacgtaagatggtcagacccgtgtagtttgggtgtttagccattgcctttatgattgtttctacagagatcccaaatgcttcgacgttgttaatcttttcgggttttgatttgtctggccaccataactggcctcccacaatctggtcatttaaaatatagacagactgttttgcaaaccagtgacctgatgaaagtacaaccacatcgaaattcggaagagcttcaattatgcgctcatcgggttggtcaagcttgagtttagttacaccatctgtagcaaaaccaaacggttcattgaactgatggaccagccaagatgaccacatccgagctatcatcaccgatgatgacctgaaataccatctctgcatcttcctgttcccacggttaaccggagtttctacctgaaaacaacaacatcattcaaaagtttaatcatacagacaaaacaaactcttggaaaaagaaagaagctctatatagtgacacaaagtataagaaaacacttgcctgccaaagaagacacatcatggactccatctgattacgagctactgaatcgcctataaaagctagt

SEQ ID NO: 26260 - DNA, 486 bp, Arabidopsis thaliana columbia
cgtgttggacgcggcaccttgttcggtggcaatattcatagaccgaggagagaccgagggacgtcggtccgtgttgatgaccaatacgtggcagaacgttgcgatgctcttcatcggtggcaaggatgatgcggaacgctcgcgttatgcatgaggatggctgaaaaaccagaccttaacgttacgatgatacatttccgtcacaagagcgctcttcaagacgaagattacagcgacatgtctgagtacaatctcatcagtgatttcaagagctatgcagcgaacaaagggaaaattcactacgtagaggagatagtgagagatggcgtggagactacgcaagtgattagctcacttggagatgcctatgacatggtgttagtgggtcgagaccatgacctagagtcttcggtcttgtacggactcacggactggagtgagtgcctgagttaggtgtgatcggagatatgttgacgtcgccggatt

SEQ ID NO: 26261 - DNA, 532 bp, Arabidopsis thaliana columbia
taaaaagttatgacgtttttacgattaggaaacaaacaacaagacgttttagaagtaaccaaacgtcacccactctaattcgattttactggacgacgagacgaaacactgaacaagaaaggtacaagctttgatcatacttcaccgatgggtgaaaaaatcgaaagatgataactttaggggtttttcaaaactcgaatcattcaaacgaacatagaagaagaagatcaatttcatgttcttcgtataacaaaaccaaaagaaacagaaactcacaatacaaaagataagatcttggtgaaaatccaagtgtagataacggcgagtgtagcaccaacgggaatggtgacaagccacgaagcaacgatctctctcacagtctcagctctcacactattaagccctctagcgaaaccaacacccatcacagcaccaacaagtgtatgagtcgcagaaatcggaagccctaatttcgaagcaaacaaaacaaccgacgctggcggcgaattccgagcgaatcctcttgttggtg

SEQ ID NO: 26262 - DNA, 518 bp, Arabidopsis thaliana columbia
tgaatctgttttgctaaaagttctaagggtgcttaaaataggatttctcgatgcaaccgcctgcgcaagagattgtagctaaagatttacatgatactacatggactttcagacatatctatcgaggtttgaatcatctaaagtttgttttattagtctaaaagattgaaaacttcaacctgatttgttttctttgatgtaatctgatctcaggccaaccaaaaagacacttgcttaccacaggttggatcgtttttgttagcacaaagagactatttgcgggtgattcagttttgtttgtaaggtatgagtcatactttgatcaaaacattaagcagaattggactttcatcttctcataagggtacttgggtttgcagagatgagaaatcacagctgatgttgggtataagacgtgcaaatagacaaactccgactctttcctcatcggtcatatccagcgacagtatgcacattgggatacttgcagctgcagctcatgctaatgccaatagtag

SEQ ID NO: 26263 - DNA, 585 bp, Arabidopsis thaliana columbia
caactgtataggacaagaatgttgttcccaccaaaaggagccatggtgctgcctctaaaatccctggttttgggaggctgtggagggagttccaaaggtttctccttctgtattttctcaaactctgtaagacatttaagacctttttaagaacaagcactgagaggaatcatatgttcacaaaaaacacaagtggggtagtatgagagaggtgaaattgatagactaaccagatccatcaaggaaaagcccaagaagacaagaaaagggaactattgtttcggcatgtgcaaacctaagccttgctttttcgtaacttccaggtgggagcttttctgcatgataattgaataggaaaaataattagatctggtgtctacgatgacaaacaaatcgttcattatttcttggttaaagtttgaggttacttcccgggccttgatagcttcttccattgaatgcaaaacatcttctagaagtggactcccattttgtaatcaaggaattccataacctttgaggagaacacttcaaatcactgccattcagaaagaacctcagatgttgtgtaccatactagattat

SEQ ID NO: 26264 - DNA, 456 bp, Arabidopsis thaliana columbia
tgagaaatctttgttgagtagccaaaaaatctttgccactaacgagctctccgtagctgcgattctagcatgtgggcacgtctatcattcagagtgtttagagcagatgacacctgaaatcgacaaattcgatccttcttgtcccatctgcacactgggtgagaagaaaacattcaaactgtcggaaaaagcattaaaggcagatttggaaatgaaagctagacacaacaagagactaagaaaccgcgttgtggacagcgatgaatttgtcaagtttaataacaaccacgaagcggcagtaggatacaaaggtaaaaccccaaagctgatatcaagttcaagcttgagaagctattccccaaagcctttccttgctagacacttctctttcgggtccagaagtaatagtgttaaaccccaaaagagaatcattccccgagctctcttagaaagaaa

SEQ ID NO: 26265 - DNA, 816 bp, Arabidopsis thaliana columbia
caccttctaatggcgacaacataagtgcttactcaactgttggtgagtttctcttcagcctctaacatcaaaaacatcggtgcacttaatgaactaatttcccatttcattgcagtgtccaactggtcggatctcttttaagctctacgattggaatccagcggagttcccacggagctacgtcatcaagtattctcaagaattatatattacagtttagtgttcaaagactatgtttaccttctcagaatctcaaagaactaatatcttgcgattaatttgaatttgcagatatttcaatggttggccaacatgcctgttgagctggagggctatatccgcccaggatgtacaattttgactgtctttatagcaatgccagagattatgtgggcgaaggtacatcctgttatcttttactcatcattttcatgttcatgatgccgcgacacaacataagaaattgtttattttcagtaggttgtagtctcgagatatgctctatttctctatgcaccttaccctcttaagtaccatatacacattaaagctcttacgtttttgtgtgacctgaagttcttttgttactaaaaattgtccattatttggaagcttttgccctggagggagaaaatgcaaacttagtatctcttcccgtgaactctcttttgactttgcactgtaataaacttttccaatttgttcctgtaaacagttatctaaagatcctgtggcatatctggatgaatttattcttaaacctggaaagatgctgtttggaagaggctcgatgactgtctatttgaacaacatgat

SEQ ID NO: 26266 - DNA, 574 bp, Arabidopsis thaliana columbia
tatgtatctactttggtttctacttgtttatgttacaacgaaagcactagaagagcctgtgaaatgatggactgacccaaaaagcttctttgcagcaccaaaatgggtgatcctataaacccctggtgatgcagactcgggaattctccattccacagtggcctgactccgggagctcagctttttatgcctcgaccacttgaacctcagacatagatcatcgtcgtcataaaccggggtccaagtcttgtccttctgctctagtctctccaccagtgtaaacgtccctgtcatgaacatagtatctcttcttagcatcaaagtatgacaagtcacttattttgaaaggatccatcactaagaagtagacataagcatatgcaattttagaaatttatgagcaataataacccatgagaaattcacgtcagcaagaatagttagtatttcaatattttcacttttaaaagctcacagttttgcatcaacgcgactatgctccatggttaaggttattatccttcatcacagaattagagaaaaagggacagaaaagcttacaggcaagcacaag

SEQ ID NO: 26267 - DNA, 431 bp, Arabidopsis thaliana
ctcaagaagacaacactcttcactctggcaacgtaaagcttctaagtcagccaagtagcttccgtgtctgccctgcatatcatcctttgcttttcccataaccactgtcttttctttctcatgatctgcaatcttttgtttacaattcaacatttccctctcggtcaatttgagtttaccctgcaaaacctcgagagctgtctttccttcctcaacctcatcggtcttttgcctaagtatctcttcaagtctaccgacattctcctcaaaaacctgcaacctagtcttcaatctttgtttctcttcttcaacgctgctcaacttcctttcaccatctgcagcttctgtagacaagtactccagtttcttcagcagattctccgtcaccaaatgtcttctttgagagttcctcctgaagaaattcagtcttc

SEQ ID NO: 26268 - DNA, 1015 bp, Arabidopsis thaliana
ttatttaaataaaaactatatgttatgaaagttttcaatatttatgaaataggggtaatgagaaagcaccactagcaagtttggtatgtcactattattcagttttgggcctattaaataatttaataccttatttctaccacatgtatcaactggtccaaaagtattaaatgcgtatttataggaccaaaagctgattataaatgtttcactatacgcggcttttgtgtgttttcgacacatatgttctatggaaaagtcagaaacaataactaaggaaggtaagaagaaatcttactttgccttcgtatagattatacactatagttcagttctgtgcataccattaaatagcaccattgtgaaggttctaaacagggttagtaaattttgtaccttctatacataacgggaatgataccggatttgtagagagcaattttctcgtagatcggctgagaaagatcgaaatggtggttgggagggtcgcatgcaccaccaggaggacaaaagttagtggcagtgaccacaatggatcggccttttatgcaccattgaggatcgttgacacacatcagctcaaaacatgcgccacaactaagtccttggtcgaataacgctgtgctcagcgctgccgtctccagtccataaccttggctatacagattgccgtacccgcatgctccacctaatttagttcattaggcagatcaatgttcaaaatcattaacaaaaaattaggtcctagattatatgtttgcgtttgtatttatttttattgttttaaacagtagaatttgtatgaaattaaataaaaaatgcatgtttatatcacaaaagtctgtaatttttaatcatatataacaattaacattcggaacaattgagacattaataaatatatttctcattggccgttgacaatgttgcatgttaatagaaagctagctctgaaaaactgaaatgactaaactaccctttgttagttaaattaaggtgatgcaagtgaaaatga

SEQ ID NO: 26269 - DNA, 543 bp, Arabidopsis thaliana columbia
gctgcatgaaaaggttccagatagaagagaagaggtaaaagatatacggtggtggtggcgagatatcctgatgacatgcgggaaaccccgacaatctttatggattgcgaagacacattggatacaaatatatgtgggatcaaacttcttaatcgaggcacaaaaatggcaaactaaagaagcttgtgcagggtaaaaggtgagagggtgggaatggctttttgggtggtctacagcaaagggtattgacctcatcgcacagatcggatgcataatgagcttgcatgtagaacagtgataaaaaatgtcgttgaaataatggtgacaacaaatgcagttttgactctgtggagaactggtaagtcgaagagagtgaaaagggtgggaaggatgtatgatctcgaatggagactctacgcattctttgtggaacattttttcacatataaggcatgcataataggttgcactgagcgttggaccccgcatgcacacaccgaaaatcttctggatcaggttgttcagtgttgcccaaaagagaag

SEQ ID NO: 26270 - DNA, 521 bp, Arabidopsis thaliana columbia
gagaggactcgtacagagtagaccaatgtgaatgactttactaatttcttctttgaacttgagatcgagtttgggatcgatcacgggttctaaaccgcatttgtcaagtgcagtgcacacccattttgccatatctttatctccaagttctgaatcagttggttgcttccctgtaaccagttccaaaagcaccacaccaaagctgtagatatcgctcttttcattcacccgaagtgtgtatacgtattctgcaaaattgaaaactattaatataagatcaaaagttacaaaatgcagctgaaatatgttttggtttatacctggtgcaatgtaaccacaagaaccggcgatcccggacatagcttctggagttttggaaccactcatctgaccgactttagcgatcccaaagtcagcaactttagccccataatcgctatctagcagtatgttactcgacttcacatcgcggtgcacaatgggaggacacaatcatggtgcaagtatgataaacctcggca

SEQ ID NO: 26271 - DNA, 838 bp, Arabidopsis thaliana columbia
ccatcaccaccacacgttataaatccattcggacaaacttgtatgtcagtcaccccagcctacaccaaattcgtaacacatacccaaattcgattacatacaccgacattactttgattctgctttactaagaaaccaaagccactgtgagaaaatacgatcgaaaggattatgctttaggtgatttggttcactaacccggatgattccaccgtagcctctcgagtttggctgcagaaaagtgtgtctttcgtgtagtttaggccaatgatgaatcaactttgcagtttcgcatcccaaagttttacttctccgtctttgcttcccgtcaagaaaagacttgtgcgtgggattgtcgctatttttgtcacactccctgaaatttgcatcaatgtcaatcaaatttcaggatatttttccggtaaaattggaatatgaaggtgaaaataggctttagggtgtgcaccgtaagtgagcctttggtatataccaaagcatcccattcttgttttgatctccatcagtcgaagttccaccgtcaaggttcctttgcttcttcatctttccggttgcaatataccggatatcgtgcaaaccgacatcaccatttttgtcaccagtcacaatcataggagaaattgaaccactaccaatgtcattatcaaataccgagatagagcgtgcaccatcttcatagaagaaaagggacgaaacaaaaaaaaaacttgttaagagttgtgattatgggaaatgatactaacacttctacaaagaaaattattggaggaccttcatggcaattgatagatgcctgggaggttgaagggggagctagagt

SEQ ID NO: 26272 - DNA, 551 bp, Arabidopsis thaliana
attgtttttccaatagtagctctttttcttccatttgctccctggaaaataccaaagcttcccgagaagaaataagctcgaatcttacatcagtcagaagctttttcactttcatgaagtcctcatggtttcattggcttctcctaaacgtttcacggtttcctctttaagcttattcacttcatcctgggctatcagccactcttctgtctgtttcttcaagttggcttctgtttctctaagcttttcttgttcaagtttcttcgtagccttagaaatctctaattcttcttccttctcctcaagagctctctgaagtgcatatatttcaccttcttgtctcttgacaacttcgttggctttgcttaagagttgtgacttgctttcaaattcagaaatagccatagaaacctccttgcttctgtttgcaatctcttgacgcatcttctctagctcttcctctttcaaagtcaaggacgattgcaaagcagcacgttcctcgtctctttcccttagcttatgctttaactcttctatctccctggcttgag

SEQ ID NO: 26273 - DNA, 463 bp, Arabidopsis thaliana columbia
cacatgatcaaaccttaaaaaccatcaaaaagaagaaaggatagttactattacagtagagtttaacttagaatccaggtatataaaagtaacccggcaaagtaaacactgcacccacatattatattatgttctctactattacaaaccattgaacatgaaagaaaaaaaatgtctcaacaaatggttaaaacattcagatcacacgaagctctgtaagaaaggcggcgcatagatccaagaagagaaactgcggaccgttaactctctgtatatccagcaagtacttctcttcccgggctttgtatagctgtttcaaaatcaaaagtgaactcagaaagtgtataattgttcttcgaaaacagttggttcaagttctaaagaaggttttagtctatgtcctagctggtttagttttgttgaactactactagtgggataaaacaacatcaggatcttagtc

SEQ ID NO: 26274 - DNA, 475 bp, Arabidopsis thaliana columbia
ggccaaagattgtgcgcaaatcaatctgcccgagtttggaaacacacgagacattttatccgcaattattcctccgaccaatgatcctattgcttgtccggtggcaaatattccattgaggagagccgcctgattatgatcaaaacctggaaaaaagaactttgagaattcagagatctttttggtttatttatctaagttaagaggatatatatgttgtatatagtaaatgtattttgaaaaataatcaaaaaatttaaagttgtactcataaattatattatatttcgcctttagaatgtatccctagtaacaaagatttggttttgtttgatgtttaaggggttaaggatttaatgaaccattcatgttagatagaatatatggttggttcatgtttgatgtttgatataaaacacatatacgtctggtttggatgaataccaatgagttcgaaccacattgtccagaaaag

SEQ ID NO: 26275 - DNA, 516 bp, Arabidopsis thaliana
gccagtgtccagtgtgctctaaagtattctggttaacttctataccggagacgtcacacaccgctatggctgacgatattaaagtcgccgttgtcggcgcgatgtccggcccgattgcccagtgggcgatatggaatttaacggcgcgcgtcaggcaattaaagacattaatgccaaagggggaattaagggcgataaactggttggcgtggaatatgacgacgcatgcgacccgaaacaagccgttgcggtcgccaacaaaatcgttaatgacggcattaaatacgttattggtcatctgtgttcttcttctacccagcctgcgtcagatatctatgaagacgaaggtattctgatgatctcgccgggagcgaccaacccggagctgacccaacgcggttatcaacacattatgcgtactgccgggctggactcttcccaggggccaacgcgggcaaaatacattcttgagacggtgaaccccagcgcatcgccatcattcacgacaaacaacag

SEQ ID NO: 26276 - DNA, 456 bp, Arabidopsis thaliana columbia
tagagcacctgtctcaagcagtgatctcttcttattctcatcgatgttactatccctatgcaactcaacaatatcgctagtgaagagcttatcagagagatcacggaacagatttgaaatcccgaatagctcgccttgaaactctttacagtcctgatcacaagacaccaaaacattagaatagcgaacaatctctttaataaggctaataaattaaagactgtatatttctacatacctggacgccttcaaagtaccttgtctccattttccctgcaaccgcaatgtttgagagctgttgtttgtatacttgtcttgtataaactagttcctcaagggaaccagcactcaacaaacgaaaaaccaccacatgacgtttctgtccataccgaaatgatctatcttgcgcttgcaagtcatgagacgggttccaatttgggtcaaatataaccacac

SEQ ID NO: 26277 - DNA, 435 bp, Arabidopsis thaliana columbia
tcgtaagagtattcctcggtctggtaacggtatatttcattaatctttttcaggtccaaccagtagtattccctgatgtggaaatttaaagcaacaagacgattgttgagagctcggattagatcagctgacccgtcctctggcgtaagatctcacgagcgcagaccaaagccgaataaaagagtgcctgacaaagtaaacgataaataaagcggtttgccaattgcatagacagcttctagtgcaaactcagattgaaggaactgctcacctgaatctccaggggatgaccatggattcccattcgacggtctatcatgcaggacccatcagtaactaacaaagtaggaaacatatcgaaaccatcagcgagacacagctttaagatcatcttgattccagtctgcacatcaactctttcctgcacggaaagat

SEQ ID NO: 26278 - DNA, 499 bp, Arabidopsis thaliana
ccttctaagttctcaaccttcattacaaatcctctcaattcaggtttcttttctaacaagcaaaaactccaacctttactttatttttgttttgttttgtaaccctctcagatcttaattctcaaagaagtatgaagagagaaagatctgatttcgaagaatccctcaagaatattgacattgctaaatgtctgatgatactagcacaaacctccatggtcaaacagatcggtttgaaccaacataccgagagccatacaagcaaccaattcgaatgcaaaacatgtaacaagagattttcttcgtttcaagcccttggtggccaccgggcaagccataagaagccaaagctcaccgttgagcagaaagatgtgaaacatcttagcaacgattatagaggaaatcattttcacaagtgttccatatgcagtcagagttttgggaccggacaggctttaggtggtcacatgagacggcataggtcaagcatgacggtcga

SEQ ID NO: 26279 - DNA, 565 bp, Arabidopsis thaliana
taaaggtggtgaaagatccgagatggggaagatgctatgagagctatggtgaagttgctcaaattgtttctgagatgacttcacttgtctcgggtctacaaggggagccatccaaagaccacacaaatggttacccttttcttgcaggaaggtatgtttatatatattaacattgtggcttaatttgtgtctttagtatgcttaatttcatatctcatggactctggtcacttgatgatagaaaaaacgtggttgcgtgtgccaagcactttgttggagatggtggtaccaataaggccataaatgaaggaaacaccattttgcggtacgaagacttggagagaaaacacattgctccctataagaagtgtatttctcaaggagtctctaccgttatggcctcttactccagttggaacggagataaacttcactcacactacttcctcttaacggaaattctcaaacaaaaacttggtttcaaggttggttcagtttgaaaacaatctaaataaagctagagatgtattcattgtattcatttgatttcatattttttgtttgg

SEQ ID NO: 26280 - DNA, 496 bp, Arabidopsis thaliana columbia
cataaatagagctcgagtttctgcataaagaggatcttctcgccgcaatcaggcatcaaataaacccaatgctgatccacaaaacttgcagcctgggcaaccacattgctcaatctctgatcaagtgcaaaaggtgaaacagattattgttgacactttaaccgggataaaacggattcggtcagagctagaaagatagggacaaaagttagaagcttcgatacttgaaattgatgctttaggtatgatctgaataaccgatgaacacttgtttattttctttactaattaggttctttgtgttggaaaaaacaggggagaaagtgtcggaaatcaacaaaatcctcaagtaaacatcaagtttaaaagtgactgaagatcaggaaatggagcatggactcttttgcaaaatttgtttgtatctcgacgttagctcattctagactttagaactttcctgagaatgagattgatctcataatccctctaattgatg

SEQ ID NO: 26281 - DNA, 514 bp, Arabidopsis thaliana columbia
aagcatcttccatgatgcaggaagagatatttggacctttacttcccataattacggtacaaaagattgaagatggctttcaggttatacgttcaaagccaaagcctttagcagcgtatctcttcacaaacaacaaagagttggagaaacaattcgtgcaggacgtatcagcaggaggaattaccatcaatgacactgtcttacacgtacaaaaagaagtcttttgtcatacaaaaccaatgttccataatgctagcacttattaaagatggtttgttttgtctgcaggtgactgtaaaagatctgccatttggtggggttggggagagtgggatcggtgcttaccatgggaaattctcgtatgagacgtttagccataagaaaggagttctttaccggagcttttcaggggacgcggatcttagatatcctccttacacaccaaaaaagaagatggtcgcttaaggctttgctctcttcaaacatatttgctgccattttggctttctttggg

SEQ ID NO: 26282 - DNA, 604 bp, Arabidopsis thaliana columbia
ttgtccatatagacattaagaccaaaaccggccggtttagtatcgtccaaccgaaccggccactctatttctaattttctagccagaacaaaatcttcaaagtcttaccatttcctccaatgttgtagcctggaggaagttcatcagaaggactgagagctaatgacgttgagccacgtatcgctctgcattacggaatcccttcaggttctcacttgtttgcttatgatccatttcagaagatcctcgccgtttccaccaagtaagagttttttattttatgtttaaaagaagctttttataaattgtttcttgtgtattcataccaatttttggttcttggttctcagggatggtagaatcaagttgtttgggaaagatcagacccaggctttgctagtctctgaagaaacatccacaagcaggtttcttgaggtgtcacttcattatctctttcttctttctttctcttgtttctgtgtctgtgtacaatcacatagccgtgacaacaatttctccctctattgtcttgaattatccagtttgttcagaaccaaggaatccttctcaatgtgaatcccaagaactagattgaggtaagaga

SEQ ID NO: 26283 - DNA, 397 bp, Arabidopsis thaliana
tcgactctacctgaatctttatgatcgataccagatagtagtgtcgaatggtgaagctgctaaaattgtatgtgagatgagtttgcttatctcgggcctacaaggcgagccacctgaagaacacccttacggttacccttttcttgcaggaaggtatagatgtacatataaacattaaaatgcagtagacttgaataggcttgttgtcatttttcatggatttgtttacttggtgatagaaacaacgtgatcgcgtgtgctaaacactttgttggagatggtggtactgagaaaggcttaagcgaagggaacactataacatcatatgaagacttggagaaaatacatgttgctccctatcttaattgtattgctcaggagtgtcgaccgttatggc

SEQ ID NO: 26284 - DNA, 582 bp, Arabidopsis thaliana
tgcttagtgcaagcaagactcatttacgtgtcgatctagctgagcttgctgctaagaaactaatcgaacttgagcctgatagtgcaacaccttacgtggtattgtcccagctatattcaattattgggaaaaacagagattgtgatcgaataatgaatatcaagaaatcgaaaagaataaagaaggatcctgggtctagctggatcatcttaaagggtgaagtacataattttcttgcaggagatgaatctcagctgaatcttgaagagataggtttcacattgaagatgattagaaaggaaatggaattgatttgagtcagccatcacatgaaagcagttttccaatgaagcaagatgcaagcacatggttttcacttcatcaacagagagcaagaagctctcacttggtcatatgcatctaataatggatgggtttgtctatatatattcttcacagtaaagtggtgtagaggtttctatctctcacttcatcaaatggaattgatttgagtcagccatcacatgaaagcagtttccaatgaagcaagatgcaagcacatggtttcacttcacaacagag

SEQ ID NO: 26285 - DNA, 559 bp, Arabidopsis thaliana columbia
gctaaagatgatatactgtttctgtatttatagagatatgttgttattataatgcatgtgaaaaatgaggtttcctagaatgattaccgcattgacgttttctttattagcataattttcctactttgcaaatgaaaatatggctaacattgaccatggtatgaagagagtttattaattgtggttaattgtcgtaggtcttattgcttttgcgctatgatagatagaagagattgcaatactcttaggaaaagcattgtcctgtttctcattaacacttctctgctcgttgttactgtcagctgctctcacccaactaggcgaaaagacaactcttgtatcacctgagatgatagttgcatctggcattccctgctgtaggtaggccttttatttcatttaaactttcacttctgttatgtggagatatgaggcagtgttttgttataactacttccattctctgctatatctatgtttatttatgtttgtttgctacgtaggttggtaaaaatcctggtgaatttgttgtgacttttccgaggtcttatcatgtagg

SEQ ID NO: 26286 - DNA, 371 bp, Arabidopsis thaliana columbia
  unsure (1)..(371): unsure at all n locations
nnnnnnnnnnnnnnnnnnnnnnctaaaggaacatcaaccggtgtttatgccagtcggcgcgttttgcccgccgctggaaaaacaactggcgatgcgctggcggatgggcgtgcgtaacagtgcacataccctggcgaaactggcgacgccatttgccgaagtagaggcgctgcgtctttccagcgtttcgcatccggaatacattggacgcgtcgcgaagttctttagcgatatcggcgggcgggcgctactaatgcatggtactgaaggtgaagtgtatgctaatccgcagcgctgcccgcagatcaatctcattgaccgtgaagggatgcgggtgctgtatgaaaaacggacactgctggtatcgagtt

SEQ ID NO: 26287 - DNA, 1337 bp, Arabidopsis thaliana
acaaacacaattctgtttaaagtaacctaattaggccgttaagaatataaaccttatttgggtcgtcaagaacataaaagcctgtataatagttttcttcttttttgggctaaagttttagttttaataatcaaaattaaacaactaatctatttgttaaatcatcatcttaacaaacctcggaacaaggacaagatcaccaggtttacaaacgaagcaacgaatcaacaattggaatcaaaaccttacctagaaagataaaccctaaagtaaattcagtttttcactttacctgcagaattggacaaagtaacttgatcttcatataatccctcgatgatccctcaaatgttcttaagaaatttcgaaacttttcacattcaccactcgattgaaccggacccgtttattcaatggatccagaggataggtccgagattgccttcttcgacgttgagacgactgtaccaaaacgaggtcaacgtttcgcgattctagaattcgggtcaatcctcgtttgcccgaagaagctaacggagctccgaagctacacgactctcgtccaacctgcagatttgagtctcatatcttccttgtccgtgaggtgcaatggtatcaaacgtgacgacgtcgttttggcacctctgtttgccgacatcgctgatactgtctacgacattctccatggttagaaccctttctacttttggcctcttttgtaactctgttgcgtttctgtattgaattggaaagaaaagttttgtactttcctgaactttgagctcttggttgaattgtctcttgaccaaagatagtagtatgagtgtatgaccaagattcaagctttatgtgaagttgtgttttgatgttgggggatgttgttattgcagggaggatttgggcaggtcataacatattgaggtttgattgtgcaaggatcagagaagcatttgcagagattggtcgtcaaccacccgagccaaaaggcgccattgattcattgggtttgctaactcagaagtttggtagaagagctggtgatatgaaggtacaacgaaacattcgaaaaatgttaatattttcacgagattagaatgttacatgctggaaatttatctctttgattgaggtttaaggtgatttaaagtgtcttttaagtcctgtgtgctttgtttctgcagatggcaactttggctagatatttcggactcgggaatcagacgcataggtatataaaaagcataagacttaagaatctaattatttacccaaaactatcaaaatctggtgtgctttaattctttgtttctcttcaggagcatggatgatgtcgaatg

SEQ ID NO: 26288 - DNA, 630 bp, Arabidopsis thaliana columbia
  unsure (1)..(630): unsure at all n locations
nnnnnnnnnnnnnnnnnnnnnnctaaagactcaaatgaattgatcgagggcccgcacaagcggtggagcatgtggtttaattcgatgcaacgcgaagaaccttacctggtcttgacatccacggaagttttcagagatgagaatgtgccttcgggaaccgtgagacaggtgctgcatggctgtcgtcagctcgtgttgtgaaatgttgggttaagtcccgcaacgagcgcaacccttatcctttgttgccagcggtccggccgggaactcaaaggagactgccagtgataaactggaggaaggtggggatgacgtcaagtcatcatggcccttacgaccagggctacacacgtgctacaatggcgcatacaaagagaagcgacctcgcgagagcaagcggacctcataaagtgcgtcgtagtccggattggagtctgcaactcgactccatgaagtcggaatcgctagtaatcgtggatcagaatgccacggtgaatacgttcccgggccttgtacacaccgcccgtcacaccatgggagtgggttgaaaagaagtaggtagcttaccttcgggaggcgcttacactttgtgatcatgactggggtgaatcgtacaaggtaccgtaggga

SEQ ID NO: 26289 - DNA, 378 bp, Arabidopsis thaliana
tcagagaatgcgtaattgaccgagatcgaggaagaagacgatggcagaagagaagctcaactctggatcgaagatcgtctacttcccccatctctctctctttctgcaacttgtttttgttcctatgtttcttttttacccataattaacacattttcttagacttttatatatttgccaaatcagtccttgtctttgtcttgtgatgaaagtaacatagaaaattagcagtagtcattacaggagcaagaagaatctttgaaatggtgaaaccgattcgagtctctcataagaatctcttttcccaaaagcttagaagctaatttcatgacgttatggcaatcgatacagagccttgtgttcctcataatctgtatc

SEQ ID NO: 26290 - DNA, 569 bp, Arabidopsis thaliana columbia
gctttctggcagcaaagaagttgccaattgtagctaaagcttggagacaagaatacggggtatttccatgctgcaacaaagggaagaaaggccataaataatatctctattattgcaaatgatcaaggacaagcagtttatgaagatgaacaaatagtaaaaactatagcagaacattaccaaacggtgttcacgacacaagagggcgagagagaagcaattgttatggaagctcttcggccttgcatatcaccagagataaatgagactctaatctcacccccaacgccccaaaagatacaaagagcctgtttctccattcatctagataaggcacccaggccagatggattctcagctagctttttccaatccaattgggatacagtgggagaaaaattaatctcagaagtacaaagctttttgtcattggtatcctgccacagagaatcaaccatactcttgtgaggttaattccaaagatcattagccctaaagtagtgggatattacaggccgatagctctatgctcagtctactataagattattgctaagttaatctcgaaa

SEQ ID NO: 26291 - DNA, 606 bp, Arabidopsis thaliana
gtttctttagtcttacttctcttcttagaggttgtgtttatatgttttattaacatgtggagttgtgatttccctgcagaatgttcttattacttcagctggttcttggaagcttgccgggtttggttttgctatttcagcagcacaggctgggaatttggataacatgcaatcgttccactattctgtgcgtttattaaacttgaaatattatttgactgttgtatatctgatgtattcaactctacaagcgagatgatttcttgggtatgactatgcaggaatacgacgtcgaggattcaatactgccagtccagccatctctaaattacactgcacctgaactgatgcgcacgaaaagtccttcagctggagcttcgtcggacatttttagttttggatgccttgcctatcatttagttgctcggaaacagttgtttgactgcaataataatgtcaagatggtaaactctaaaatccgagcttgttagttttgatattcagatagatgctgtcagatacgttttctctcaggcttgatgtcattggagtagttttaattattcagagtatctttggatttccatggttggtaatgtttacttg

SEQ ID NO: 26292 - DNA, 337 bp, Arabidopsis thaliana columbia
agaaactccggcttctgtgccaaacatattatcgcgcagatcaagtttctccattatgagtacaatgctcaagtgcttctgacaaggcgattcccccttttgagccgactcttgtggaagatcaacggaaattctccagcagtggggaacgcttgacaacctctgcaatagcgagtgccccttgatctcccgtcatgttattatgaaaatgaaggaccctcaaattctctgttgaaggaatcaactcggagaccgcttgcgcacttcccttagagataccgtcattcatcaaatacagctcttccaaagagctcagagagtttacgagtgccccaaa

SEQ ID NO: 26293 - DNA, 563 bp, Arabidopsis thaliana columbia
ctgcttgcaaaatcttgaggcgacgttgtgcagagagatgcgttttggcaccgtacttccctccaacggatccggccaagttcactattgcacaccgcgtctttggagccagcaacatcattaagttcttgcaggtacctaaattatctatatatctattggtgtaataactataagctctttagttcttagaaagaattacattaagaaagacccgattttatattaatgatatagatgggaatgattttcttgttcttattaggaagatacatatattgaaatggttgtttcggaaaatggtttcataggtcatgtgaaaattggaccttacgtagttatttgtcataagactaatgtcaataatttcttctcacaaaagccgcaccacataaccaaaaaaaaagtgaaagtattgcatatagtgtcattgtcaacgttttccttatcatgcacctttcacaaagtcttgtagaaaaatggtatttactcgaattggtcaattaaatacaaaaaaatccttacctttatgaacgaacacatgattgattatttatctatat

SEQ ID NO: 26294 - DNA, 576 bp, Arabidopsis thaliana columbia
ccatcaatcagaatgttactagacttaatgtctctgtgcaccacttttggctcaatcgcctcgtgaaggtacgcgagcctgcgtcaccacccatcgcctcagatgagaataaagaaaaaacacaatcaagaaaacaaaatcatatagctgccacaagacttacgctttggctgtcccaataagaattttcactcgtgcctcccatgtaagatactcatgattttgattgtctccacggagccattgctccaaatttccattgttaacatactcatacaccagcatcctaattaagtgttaccgcatttgatgtttagtgaaaattcagaagaaaaactgcagatcattcaacaacagaacatacatacctctgcgttccttccatacaatatccgagaaggcggaccaagtttttatgtcgaacgtgacctatagcttcaacttcaactctgaagtctttatcagcttgtcctctaagaaatacaaaaacatcaccattaaaagaaaaaaggattcaagaaatgaaatcttgaatcttgattcaccatttgtgaaaaacaacttacaaattgttga

SEQ ID NO: 26295 - DNA, 530 bp, Arabidopsis thaliana
ccgaatggttcgtttggattgcccatcggtttgaggatggtacgccgtgctcatattcactcttgttcctaaggttttttggaaagccctccaaaaatttgaagtgaatcgagtatcccggtcagagactatactcgcgggtaccccatgtagccgaacaatttctttaatgtacctttctgcaatacgttcggctctatcggtttctcgatcgccagaaagtgtgccgacttggtcaacatatcgaccactacccataccgcatcatgctttaatggacttgttcgcaatcccattacgaagtccatcgtcacgtgatcccatttccattccggcattggtaaggtttgaactagtcccctaggagctttgctttccgccttgactagttggcatgttgagcatcgggcaacccagcttgccacatccatcttcattcccacccaatgatagtgtcttttcagatcatgatacatcttttgtaatcccgggtgaatggagaatttagattgatgtgcttctctaagtat

SEQ ID NO: 26296 - DNA, 599 bp, Arabidopsis thaliana columbia
gtttagtttatatgcctgcaatcttttcgtatctcaccttccgttttagttaacacatttatcgctcccatcttgctcatcgaaagagcaaatgatttccgaaaatcctcgaaaccctctgagaattccttagatatttgcttggtgtcatcattgtaaagcagttgttgatctacttcaagtacagatttgtttgatagaattcttgagtaaaatgagcttgtgaagctgtggtttgagcctgagtccgggtttaggtacacgagcggatcggtctggcctttcctcgttcttggaggacattgctttgccatttcagataggaaatacttgttcatagtagggcttggtttaccggtcttgttgtaattgtagagtcgatcaacaacatagctgcaatgtgttctccccattgaatgtgatcctgattagggagtaactcagtttaagcgattcaaaccagaacaaaaccggtttttaagatattggcaggaagaaaaaaggtgactgacctagaagtgtagccatgtcaagaacattcaagcctctggatttgaaataagacatggtcttggtccatgagatggatggcgatggta

SEQ ID NO: 26297 - DNA, 490 bp, Arabidopsis thaliana
ttgaaaatggaatcttctccccctttttccccaacgctctcatcgtcatagaaatctgaaattcgccaaagccatcgtagaaaagtggagaagaagaatctcttcgcaaccatttcaaatgcaagatctcttcggttcagttcgccgctcacttgtcttccgttctaccaccgacgatgagaatcaagagaatcatcctcctccgtttccttctctcctcgccgataaaatcacttcctgtatccgcaaatcaatggttttcgccaaatcccagtcacctccgaataactccaccgtacaaatcaaacctccgattcggtggcggaaaggtcagttaattggccgtggcgcttttggtactgtgtatatgggaatgaatctcgattccggtgagcttctcgccgttaaacaggttagtttgagtttgaaattgttatccggtttactgattctgattttgaaattagcgtcactttaatggttcttattt

SEQ ID NO: 26298 - DNA, 492 bp, Arabidopsis thaliana columbia
tgccccatattgcaagcatcttacacttgttaattcaaaactcaggtatcattttaaatcatgttgcaagcatcttaaacttgttaatgcaagattcccgatccaaacttgtgtttttaatgctcttttccgaatctctgctgaagccacatgtcttttaacaaatgatattactgcttgcaggaaccggataaaatagtattccatgtggtgacagattcactcaattacccagcaatctcaatgtggtttttactaaacccaagtggcagagcttcaatccaaatcctaaacattgatgaaatgaatgtcctgccattgtaccatgctgaattgctgatgaagcaaaattcaagtgacccaagaatcatttcagcgctcaaccatgcacgcttctatctcccagatatcttcccaggtctaaacaagatcgtactcttcgatcatgatgtagtagtgcaagggatctactagactgtggagcttgatatg

SEQ ID NO: 26299 - DNA, 497 bp, Arabidopsis thaliana
tggacttttgtcttaccgaactggtccaagtaacggaggaactcgagcacgtgagctccactgcatcgggaaagcgaaagcggtggccgatggttccttaagtactgtccgaacgtgttccagtctctcctcttctggttctcgtaacggcttgagttcgccgatggtgaggaggaggaagacagtggttgcgttgcttcacctccggtggctccggtgacggaggaggagttgtttgagatgatgttgaggtttgtgacacctccgtaagctgaagagccttccatcaattggggaatcatatccatttttttttaacggatcgatcgatattgattagttcttgattcttgatctttcttgatggatatggaggagctgaaattttgtttgtgcggttgggagatataataaggttactttgtgcagatatatattttgcgtattaattgatttattgagaatattattatataattagagaaaatgatataaac

SEQ ID NO: 26300 - DNA, 680 bp, Arabidopsis thaliana
  unsure (1)..(680): unsure at all n locations
gggcttttgatcacatgtaaaactacataatgggttaccatcaagtaatgcaatcttagccataacacgattagttgtatatctcaacaatttttagtatctaatacacgcatattccatcaaaatagtctgcatatttaattacgattttaagaatcttcaatcatatattcaccctcctcactaatcactataaaatcggcatagacgagcttattcgattcttctaactaccataacacgataatacattccataaattagaaaaaaatcttataaatttattctcttaaatctaaaactaaccataatcaactaaacattatttaccacttatctaaatatagccaatcattatgaactaaaccaaattcgaatcattagtgaggaccaatctttgatttgcaacttatcctgcaaaatattttcgaatatttttgaaaatattagatccaacaaccctagcctccttcatcactataaatatcaaagtcattctcatcacaaaccaaattgagatcaagaacgattcgatggttattacataatcaattcatgatagtgaatgattgtttgcataggtattcatgacagagtggatgttcttctttgatgttgatgagntttacatgttccggtgaaagagacgattcgtctgtgatggatctttggagggatat

SEQ ID NO: 26301 - DNA, 1119 bp, Arabidopsis thaliana
ccactattcaaataggttttgctttcatcatcaagtttccttctaattcggcggaaacatcttccacagggtcatcttgttcgcttaggcacttcttaagttgcgataagtgaaaaaccttatgaaatgcctttaactttggtggtagatcgagcttgtaggccactactccaatccgttcgagcaccttgtatggccccacgtatctcggactaagttttttcctcttggaaaagcgtcctttccctttgtaagtcaccgcctttagatacactagatctcccactttgaattctaactctttctaacgtttatccgtataactcttctgtcggttctgagatacctttaacttaaccttaagaaagttcatcttttcattcgtctcgtccacaatccctggaccgaatagcattcattcgcccacgggcatccaacataagggcatccggcatgcccttctatacagtgcctcataaggcgacctaccaatacttctttggtaactgttattgtatgcaaactctatcaacgtcaaatgcttctcacagtttccaccccaatctaaaacacatgccctttgcatatcttctagagtccgaatggttcgctcggattgcccatcggtttgatgatggtacgtcgtgctcatattcactcttgttcctagggctttttggaaagcccttcaaaaatttgaattgaatcgagtatcccggtcagagactatactcacgggtaccccatgtatagtcgaacgatgtcttttatgtacctttcttcaatccgttcagctccatcggtttctgcgatcgctagaaagtgtgccgacttggtcaacctatcgaccactacccataccgcatcatgttttaatggacttgttggcaatcccgttacgaagtctatcgtcatgtgttcctatttccattccggcattggtaaggtttgaactagtctgctaggagcttggctttctgccttgactagttggcatgttgagcaccgggcaacccagcttgccacatccttcttcattcccacccaatgataataccttttcagatcatggtacatcctttgtaatcccgggtaaatggagaacttagattgatgtgc

SEQ ID NO: 26302 - DNA, 467 bp, Arabidopsis thaliana
ggacacacatttttttcccatccagatgggtgtaaaaggatccacactactttacatagaacggtgaagacactaccaaatctgaaatatatataagttgagtgcatttatatactctactgcggatttgggggacgactattagcagcagagactctagagccccactccaaaagttccttgcttgtatcgtctttgtgcactatcacttcaatgaaacaaaagctctctttttcctcattggttgccgtgttgattgctttcactaactcctcctcgcatctcaccttggcagtccagcattttccttctccattgtgtatggcctcaacaaaagctgtgtagttccagttctttatgacattgtaaggaccatcgtgaatttccactcaatggtgtacctccgttgttgatgaggaagattatggtcttttgccacaccgtatcatcgtagatacatcctgtgc

SEQ ID NO: 26303 - DNA, 511 bp, Arabidopsis thaliana columbia
gtcagagacgaagttacattacctttactccaaaaaacctctcatctgaaaaatcactcctctgttctctctgttttcctaaatgaagcaatctcaatctgcaaaatctcttacccattggtcctcactggtctcttcctctacgttcgctccttcgtctctctgtctttcctcggtggtctcggtgacgccactctcgccggtggctccctcgccgccgcatttgcaaacatcaccggatactctcttttctccggtttaaccatgggcgttgagtctatctgttcacaagcctttggagccagacgctataactacgtctgcgcgagtgtcaagagaggaatcatcctccttctcgtcacttctctccctgttacacttctttggatgaatatggagaagattcttctaatcttgaaacaggacaagaagctcgcgtccgaagcgcacatctttttgctttactctgttccagatcttgtcgctcaatctttcttacacccattaagag

SEQ ID NO: 26304 - DNA, 596 bp, Arabidopsis thaliana
taacggccgccagtgtgctctaaagaatacaatcagcgcaatgccaatcacaatcccaattcgcgaccagcgccagtaccgaccaacgagcactgggtcggcgtacgcgttccagagtttccgcataataacccctgtagaattatggtttagtgaagcgatcttaatgagcaaatatgaacagcggcactggtcaggatgaacggcttacggcagaatatgaacagatatgaacagaatgagtaaaaccctctgatgccacatcacattgttattgttgaagatgagccggttacccaggcgcgattacaatcctacttcactcaggaggggtataccgtttccgttacggcgagcggtgctgggctacgggaaattatgcagaatcagtcggtagatttaattctgctggatatcaacttacccgatgaaaatggcctgatgttaacccgcgccctgcgagaacgctcaacggtggggattattctggttaccggacgcagcgatcggattgccgtattgttgggctggaaatgggcgcagacgattagcgtaccaaaccgctggaactgcgcgaactggtagtacgggtgaaa

SEQ ID NO: 26305 - DNA, 498 bp, Arabidopsis thaliana
gcatatatattagacatcaatacataagtcccagcatcatccgaccctgtttctaataccttcttcaccacctccttagcaatactcacttcattgtgaacattacaagcggataagatcgctccatagaacgatcttgacagcctagcgtcatcacagttgataaaatttgtaacatctttcaatctaccagcacgaccgcagagatccacaagacacgtatagtgctcttctcgcagaggaagtgactcgtctctcacaagatccttaaagaactccattcctttctctaccagtccggcatggctgcacgcaaatagcaagttcagataggtcaccgcactaggtttgaacccgtgtttccgcatctggttatacatttcaattgcttccttcccatgcccgtgatgtgcataaaccgcaatcatactgttccatgatatcaaatcccgctggcataccagtccattatcgaacatcttcctagcagcaatcagt

SEQ ID NO: 26306 - DNA, 599 bp, Arabidopsis thaliana
cgccagtgtgctttaaaggtcttctggtgtggctggcgagtttgagtttgctggttgcgttcgttggtgcgatgaccgtgcagtttatcggcggtgcgcgcctgctggaaaccgcggcgggtattccttatgaaaccgggctgctgatttttggtatcagcattgcgttatataccgcctttggtggctttcgcgccagttgctgaacgacaccatgcaagggcttgtgatgctgattggcaccgttgtgctgcttattggcgtagtacatgccgctgcgcgttaagtaacgcagtacagaccttgcaaaccatcgatccgcaactggttacgccacaaggcgctgacgatattctgtcgcctgcctttatgacgtcgttctgggtactggtgtgttttggcgtgattggcctgccgcatactgcggtgcgctgtatctcttataaagacagcaaagccgtacatcgggggatcatcatcggtacgattgtggtcgcaattctgatgttcggtatgcactggccggagcgttaggtcgggcggtgatcccgatctcaccgtacggacctggtgatccaacgttaatggtaaagtgctgc

SEQ ID NO: 26307 - DNA, 755 bp, Arabidopsis thaliana
catgcctgtatgtcatgttttttttttttttttttattttggccgagatgcttccttgactttttccctcttttctcgctttgttaggctgttggctcgatgaaccgtctggcttatctgtacgagcgtcgtttccgcaacatggaagtgctgggctcgcaggatcttcgtggggatttgagtgctgagaagaagaagaacgacgagctcctgaagaagttggagtcggcgagcaaagaggccgcgcaccttaagagtgaggtagcgacgttggcttaccagcgaaccgttatgggtgaggagagggatcgttgcaccctggatctggagaaggagagggagaaaacggtcgagctggaggatcggctgaagtccgagaagaagaggcttcggtcccgtcgtgagaagtacgcggagaatcagacgagtaaagccttgattcatgttgctgacctctttcaagctcgcatgaatcgagtgaaggcccatctcgatgacaagctgaagatcaaccccaaattcctcgattacaaccaagtctgtgggaacgtcgctcttttggatgagctggttgaggctggggagatcgagatcaaatctaccgagctgatgccacgtttgattgcggatcgggatgccctcaaggccgaggtggagggctttgagatcaccgagatcgagaaggatgactttgacgtctggacccttttcgagaaggttctcgaggaggaacatttcgaaccatcggggggatg

SEQ ID NO: 26308 - DNA, 559 bp, Arabidopsis thaliana columbia
caaggtgatcatagcgggtgggacttcgaaacactaaaaatgcataaaaaggaaagattaccttagtgaaggagcaattatagaagatgcaccactttggagaacactcaaaccaatcaaacgaacaaaggctgccttatcttgctccaagacatacttcacagtggtccctgcaaaaatcatggttgcttgttagaaaaggaaccctatcaataaaactgatcaagtaacaatatggagtatgtttaccattcaaagaggctattcggtcagagatcagcgttcttgagacgacaaggcaagcaacagcaagcagttgagctccttgcttgtcaaatatagtgggtatctgaaatgtaacaatgaagtggtcagttattttgagaagtataatatcaatattagcatcagcgcaggacgaataagttagccaagtggaaatgcataacaaaaggtggggttccaaggaagctaaagaaatgcactgaaatgccaagctgagggagatggaagaggaaaaggtggatatatgaatgcagcctcaagaagcatgtgtatt

SEQ ID NO: 26309 - DNA, 515 bp, Arabidopsis thaliana columbia
tacatgtccaaacctaaatgaattctcaatttatcgacggcatctcaatgaagtagcaggatttaccgtaagtttatctgcaaaaccatggtcagaaacccttttgcgtagaatctccaccatacgcttatctagctcgacggctacgacattctgagcagcttcaagaaagtttcatcgtgagatttccagtgccaggtccgatctccaagactgtatcagtcggcctgatatcggagcttcgaacaatggagtcgaggattctagtgttggtaagaaggtgttggcctttgctcttgcacagaaacaatccatcgtgttccttcttctcctcgattctcacatccctctcgtatcctcttctccggcggtcgtgatcgggttttgtccgagcctgcgagtgagaatctcgtcggaaaactaaggaagataagtacgaacgagttgaattgattttgatgagcgtttggtctttcaatcgaagaatcatcactttgcttcagtcacgaaatata

SEQ ID NO: 26310 - DNA, 526 bp, Arabidopsis thaliana columbia
gttgtgaagtcacatgaagaacgtactcaatttgagaatatagagcatgttatgaacttcatgaagagagtagaattaccagtggagttacaaaattcaattccatggattgtatgggggcttttgaaagcacgaaattcttcagtctatgcagatagagtcaacgaccacaatatcgtgatagccactacattggaagaagcagaggaatggagtacacaaaactctgtggcttctcaagaaaattgttcgctaggtaaaaggattagcaggttgtcccgtcgttggagtaagttagaattgggttgtcttaaatgtaatgtccattcttcatagattagcgattcaactgttgtgggggagcctggattttgcgaaatcatttaggtgatgttctgtttcacgctcgtgattcttttctaccaatgatcaatagaattgaagcggagttaagatgcatccaatggagtcttcaaagcttacatgatcttcatattgaatggtgtgaagtttggtcagattgtgc

SEQ ID NO: 26311 - DNA, 589 bp, Arabidopsis thaliana columbia
tgaggttgagacggttggacgaaagagcggtcattggatcaggacaatcattctttttcagggaaccatctgtcctcgatttgttgcgttacattgttttgtgtcagattcaagatagcccttgagaattctcccgtcaaaggtgaattcttcgggaatgcctacacattgatcatggaaacaaaacatgtgttatttgtccccttattttgtaaaaatacatagaaaggaaacagaaggtacttacaaagccaaaaccaccagtcttaaatgtaggttcaaccatgacatatttagagcaggattgagaaaggatagccttaaggtaagcaacttcgtcgaaagctgctgcgataccttttgatttccccttggacaaaaggtcgtcggcatctttggcagaatcaaaaggctttagctgatcttcatgaaatcctagccctaatagaatatctttaacgaaagcaccacccttggtaccctacacaatccctatttttgatgagatcgtttacatttgtgaccgtcggttgcaaactttgtaccgtgaggaaagaggtgagactcgctgtgtagctctgagtgagac

SEQ ID NO: 26312 - DNA, 1869 bp, Arabidopsis thaliana
cgagcagctttcaccggtgtagttgagaacgactggagatgatccgttgataccacagagaaacttcatgtattcattgtaacctacatttgcagccacatttcatatcagtgattgatctcctttttcatatgctcaaggtaaaataatatgaacattgggggttcaagaaagtatttacctatgtcaaaaatcaaaccagggtcaagagctgcagttgcattaacaaatccgctacccatatcaaacggtgttgcaggggactgactaatgtcggggtttaagacagtgcgttgcgccattatatgctcaccctttctgtctgatagagaagccgttgttgaaagtgcggatgaatggctgcaggagtgaaatgtgggaacttctgcttgatgagcgccgcaatcccggttacatgtggagcagacatgcttgtccccgattccatcgcaaaacgttcacctaaatatcgccaattcaagatctcaaaaagactactagaaacacataatgagtaatctgataaagagaaatgagggtatgtgtaccttgaaaatcatttgtaccaatgccaagaggactccaagctccccatatcgcgtatccgggagctactaagttgggtcccattatatcagcatcatcgaaaggatcatcttctgggtcaggtcccctagcagagaaatacatgaccttgggagctgtaatgccataggtaggcctcatgccaccaacaattttagcaacagacgcagacccaacaatcttccctgaaccattttccctcaacagagaagaattgtaataccggagtaaagcctgcatgtagaccataggaagagctaagttacattcttgttcagagtttaatacactacttcacattttaagactttgattatacctgagaatcttggggggaggatattagaattcccggtatatccattggacttgaagtcatctgaaaaccggtggcagaaggatctatatagaagacaaggcctgctgctgttaagttcttagctgtaagtaatgcttgtttgatggttgagacaccgagaatgaatcgtactgtataactacagacaaggatctttccttgcaccagcttctgatcgaagctacttgaatcttggcattccccaacatatatagcatccataacagttgtaccattgcgaagcgcatgtgtagctaaaacaagtttatgcattattcttgtaccagctaataaaacatgagaaaccggttaggtcaggtctagatggtaatcaagcaagaagaagctaagctataatccaaaatggacttacatgcgagtccaacaccaggaatagtgacattatttccgaggattatcgagttactatatactctatcatgagatgtagctcctactgtgaagatccatggactgaaggaagacatgctcttaggagctggtcctgtgtttccagctgcttgcactacaaagatcccggctttcacagctgaaagcaatgccatatcgattgggttaaagaacgtagcgataccaggaggacgtctatttggtgtgattgataagtttattatgtcaactccatcttgagccgcctgcaaaagaaaacatccataaccatgtcaaacataagaaaaactgtttatcaaagtttctgttacaaaagtaacatttttagttacctgatctatggctgcaatgatatctgcagcaaagcctccaaacctcttatacaatgccttgtagatagcaatactaacaagaaaagacaagacttttagtttctatatgaattgtttccatagtgaacatcattccgtggtattgacttactgagcacgaggagccatcccgctagcatttcc

SEQ ID NO: 26313 - DNA, 602 bp, Arabidopsis thaliana columbia
ctgttaatgacatcggaattcctccttgttttgctttgaaattgacgtatcccgaggtatgatgtcatatgtcggtaaattgcactcttgacacatcattatctttggctgttaaatcacacgtcccaacactcttagatggagaaaatgttgggttattcttttcagattttgcatcattttcctcttttggtggagatgacttgtagctatccttagatttacaaagatacttgtccaacctatagtggagccttatgtttgtttttccggaagtgaaagttaaatgtattgctgcagagggtgactccttggaatgtggagaagttaagggaagctatcattaatggtcctgacattcatcctggagctacacattactctgacaaatcatctacaatgaagttgccctctaccgaaaaagcacgaagggcaattgcaagaaaattactgtcctcacgaggagccactacagaacttgggaaaacttgtgatatcactttgaaggtaaactgtccatcgacatatgcgagatggtgcatcgtcttgtgaatcgcaggtgtggcacatattgttttattcacaatgttgctatataaatg

SEQ ID NO: 26314 - DNA, 541 bp, Arabidopsis thaliana columbia
gcatgcctgcgaatttttacttagtacaagacacattaaatccacatatcgtatttcaaactctattttacttttaataaacttaaaaaaaacaacgtttttttattaaaagttacatcgtttaattccttcgatgaatcaacgcgtcgatattacagtttacatcgtttcactgtttatgcttccatcaaataaaccctttcactttgtataaatacaactgctactcgcgacttcatcaagacaaccacatcacaaacgcaaagcaaaagcttaccatatttctcagttttcgttactctttacttctctttttcacgatggttcaacatcaccatctgtacgagttgtctcctatgattactggttggacgatctgtgtcatggtattgaaaatttacaaaacatttgtcaacccgaatgctttcgaaatacgtcttgtcttggccgatgaatgggtaaacaaatttctccaatttctttcgcaatttgcagaatttgtctttaccgtgtatctctgaccctaaaatgttgttttaca

SEQ ID NO: 26315 - DNA, 1757 bp, Arabidopsis thaliana
caatcggagtcaaacacgttgtataatatcagagccagtcagacaaaaaaacacagtaattgcaaagcaaaatcatctaatcatcaaactaacataacatgaatattcaatagagaacatcaaaacccttctaaacactgagctcgtagcacaatagaaatcggaaatgtcatttgttcgtcggacacagaatacaaacacaatcctccaatattattaacccaattcctaaacctcgtttataatacaacaaacaattcactggagaaagagaagcagagaaacaatttgcttcaagagcatattcattatatcagaagcaactggagacacagaagaaaataaatagagaagctcgcctgtgtagttagccggagagagaagcaatgacaggtctgtttgccggagcaagagaaactcgcagccggagactcgtcgaagactcgattcaaggcgaagtaagctcgccgaagactcgatcggtatatttaaattagggctttaattttaattcggtttattcgtgctatactcgaaccgaaccggataatcgaaattaaaaagaaggaaacgatcaagttattattggagtatccgaacccaaaccgaaaagtgaatttcgggtcggtttgttttcggataagttaccaaggcctaataaattggtaaaccgtaaaccgatgcatcagggtttaaaatgtaacaaaataatattttaggtgacaattaaaaacgtaacaataaaacaaggggttatattcgaaacgtttgcacctaaccttataacttcgcatttttatactctgttctgatcgcagcaaagccgacgttgaactttctcgccgccggagcgcgtgatctccactctctgtcatcgaatcactctaattgaagattctccgatggcgattgtctatgctgttgtagcgagaggtaccgtggtattagctgaattcagcgccgttacgggaaacacaggcgccgtggtgcgacggatcctcgagaagctttcaccggaaatctccgatgaaagactttgtttctctcaagatcgttatatcttccatattcttagatctgatggtcttacctttctctgtatggccaatgatacctttggaagtaagtatttttcactttctccgaatcgtaatctctcttaagaagatttagtctttgtaattgattctgagttttatgttttgatgtgttggtgattggattttcagggagggttccattttcgtatttggaagagattcatatgagattcatgaaaaactatggcaaagtggctcataatgctccagcttatgcaatgaatgatgaattctcaagggttttgcatcagcagatggagttcttctctagtaatcctagtgttgatactctcaatcgtgttagaggagaagtcagtgaggtataattgtttcttcgtatgatctctagatattactcagctatatccattgaaaaggttgaatttttatgagttattacgccttcttggctcacacaggcttctttaaatctgtcttgggtgaaagatgaagtttgttatctcattgttgtgttatcgtgtttacagattcgatcggtcatggtagagaacattgagaagataatggaaagaggtgataggattgagcttcttgttgataaaacagcaacaatgcaagatagctcgtttcacttcaggaagcaatctaagcgccttcgccgagctctttggatgaaaaatgctaagctcctgtaag

SEQ ID NO: 26316 - DNA, 429 bp, Arabidopsis thaliana columbia
cagatgtatccttaggccccaagaaacttggctggttcgtagaagacaatagcctcgcccacattctatccgtaatcactacattgttctgggtctctgttatcctctgcaagacaaacaaaaaaacaatgacacgattcagaattgctcacaagtacacgatcagattcaattcaggaccatcccgcacacattagatctgtattagtaacttacgtagaaagggatgtatgtttgtcttccattgacaagaccactggtgtagccagtgtaaccagccattgcaccatgaaccgcgctctgagcaagaagtgtacagtaaacattgtctgatgcattacttggaacagcccggatcatgtatgtaggatcaatgtatttgagattcatcaccatcttattcttcttaaaatgatcctacaacaagag

SEQ ID NO: 26317 - DNA, 451 bp, Arabidopsis thaliana columbia
cagctcagaacaacaaaagcccctgctggctatcaaaaacgaagatgagaaatcgatcatctctgaagaaaaaccggtgaaatctgcttcagtttcatctcatcacgtctcacctgaagacgacgagacaacagatattttactgtctgagattctagcatcaaagcgaagggaagggaaatctattattcccgataagaatctagtgaagacagaacaagcttcaattgaggaaggtccatcaagacctgtaagttttccgctaactcagtgtaactttgctaaacccttttggtctcatatgccattctaacacaacgcaggtaaggaaaagaacaccgcgcaatcgtgaaatcattacgaaggaagagagtacccaaagaggcgtcgggtttcaagagagaagcgaaagtctaatgctgtgatggcttctaggttttcgacaggaaga

SEQ ID NO: 26318 - DNA, 573 bp, Arabidopsis thaliana columbia
tctggcaggaacctggaagattcttcagcttttctagactttgttgtgctcttcgtggtgttgatatgaagacttatatcttcttattagtgattgttcccacatgtgtactcgctggctatgtccacggtcagaagatttcttactttctccggcctttatgggaatcaccacctaaaccttttcatgacattcctcattactaccacgagaacgcttctatggagactctttgtaaactccatggctggggtgttcgagactaccctagacgagtttatgatgcggttttgttcagtaacgagcttgatatcctcgctgttcgttggagagaattgtttccttacatcactcagtttgtcctccttgaatcaaacacgacgttcactggcttgctaagcctcttgtctttgctgctcaccgagatgagttcaagtttattgagtcacgcttgacttatggtactgttggtggaagatttgtcaaagggcagaatccgttttacgaagaggcgtatcagcgggtactcttgatcacttctgagaacgctgggatactgatgatgcttgttgt

SEQ ID NO: 26319 - DNA, 413 bp, Arabidopsis thaliana columbia
taatgtaacttccataatcaaccagatttactcagtatatgttaaaacatagtggactcagaagcttgtaccttgggaataatgatgtataggttctatggactatgcaaatgctgctgaagaatatgtcttgaagaggtaagccagaatcttctcgtaatcacctaattgggcaccggtgtttagatcaaccaagaatggagcctgtaaattatattgagcatcagcagttgcagccttatgataagtgatttgtaagattgtagattctgatatagacaaagagcggacgagaaaatggaccttattggatcctgaagcatttagaagtgatttcatccgtgtggacccttcatccaatgtagtgtaatacatagggaagctccagatcacacagtgcttcacgcaccaac

SEQ ID NO: 26320 - DNA, 508 bp, Arabidopsis thaliana columbia
catcaagtacttcaaaccactgttgagatttttaaaagtgttagattagtgaaagataattatgatttagtgattctgattagagagagagggtttaaagaggggacctgaatgacgtggtttttgaagcttttgccttctttttctttacgagctctgtattcgacgtagagaacagagatgagataagcagtccagcttcctagtaaaccatagaagatctgaagtactattcctgataacattcctagttgactaaacgagtacggtaatgtcaataacacttgagccacctgaaaccaacgataattactacaaatcagatctttcttcactatgagaaatccgaaattttgaatctttagtttatggttttattggtttacttggttagatgcgcagtgaaccaagcgtcccagacagagccaccgtgccataggaaattgcttaggttagaaccggtggagccgtcgtgttcttcgttatctttcccggtacggtttccgtt

SEQ ID NO: 26321 - DNA, 469 bp, Arabidopsis thaliana columbia
taaacccttctagataaaacaacgacgttacgacaaaaaaatcaaaaccgtaccgaaccggatcaaaccaatttaaaccgattctagtggcacttgtatattgctaagagaactactttaaaaacatgttacaaaactttagaatcttcacacaatgaaactcttattcctctccccctcaccctcgcattgttctccccctcgtctctcacctcccgccccgccccccgacccctcctcaccccccacccgcttgtcgagccagtcacacccgcccggggaagaggagagcttggctttgcttcagtgacgccctagtgagttcttcacctctcttgcacaactcttccacttgcccatccatacctttggcgatctcctccatcttacctctgctcacctcccagcccgattcactacggtctccatccgagtcaccctttgcttccgcagttcttttctcgttgtt

SEQ ID NO: 26322 - DNA, 526 bp, Arabidopsis thaliana columbia
tggagtacctgaatcattcccttgcctttgatgctgttacccatttcaaggctaagttctccttttgcaagtttctggccgtaccacgcattacgacctttcagtaatgttacataggtatccgcaagcaaaggcccagcgagtttctctggctccttggccaataaatgagtaataaaaatcatctctgaagtacaatgcgcaaagtacactgatttgctggtagcactttccttagtcagtgtagccaccattcctgtggaatacaaaaacgccaaaacaaacactagctcataaactttgacctctgatcaccagttccagtaatttactttgaatcactattattcagataaccatttaagacacctgatcttacctgcaccaatggcataaacattcttcaagccacccattacttcatgagtaatgaggtcactattatcccagactatgaaatgagactgccttagaaactttcccaaaggcttcctccatttttcagacccgcaaatccgtgcattgg

SEQ ID NO: 26323 - DNA, 516 bp, Arabidopsis thaliana columbia
ttatcttatacacttgatttcgtttactttgatgcatttttttcctgtttaagggatctactgcttagtgatgatatttgcttttctctttagatttcatggtaaccgtctagctgagatgccgttcattggaactcggcatgtctacagacaccaagggatgtgccggcggttttcagcgtagttgaatcagtaagttcaaccgctgatgtagcgaagttaactgactctttctgtataactctgctaatttgttttctggttctctgtgtcttttgatgtgaaggctcttcaacatctcaaagtcaaattactaattatccctgcaactgccgactttagccatgtttggatatccaaattcgggtttcgacaagtcgaggattctctgaagaaagaaatgcggtccatgaatctgctaaccttccctggcattgatgtgttacagaaagagctgttagcaccacgacataccgagtctgctgtcgacacaggttttactttaagaacaattta

SEQ ID NO: 26324 - DNA, 551 bp, Arabidopsis thaliana columbia
taatcgtcagcattgtcataagctcatttttaaaatttgaagagaacaaaacgcaatcattattaccattcagaagctgcttgtagcattccatcagttacgatacgtgcaccagagagaagagtccctagcccgatcctggaaacgataatgaccaaattaattctgataactatatctatggattgaaatgcaacacagtgaactatatctatggattgaaatgcaatacagttcaacagttttcaagaaagaaaacgaaccccgggaataaatacatgttgttagcctgattcacatgtcctactttaccattctctgcgagtgggacaagaaaatgtgattattcttagattatagcaaattagatacaaagaccatcaatgaatcccaccataacataccaagttcaacgttctcaaatggacttccacttgcaaagacaatgtttcctccggcgtgtttgaaagcatcagcagcagtgcactcggctgtcacacgaaaagatgttcagggcagatttttcaaagatggaacaacattactttgct

SEQ ID NO: 26325 - DNA, 1070 bp, Arabidopsis thaliana columbia
cataaccctaaacattaaaagtcttcgaaaatataggacgctattaataggctgatagcattagagtgatgcattcaacagtatctaatctgtccccaatcctccaaatctgcgtttttctcctcccttttcgcttcgatttctgattttgattatttgtccattccgtgattccataaagagagcagttccatcgaggtttcatcattttaccaaatgtcgaatttaaactttgagaaaaggagagcagtgcgactaatgatgagccatgaccatggatataattgtacggcggcatcacacggccgcaaatacccgattagctgtctcagccgaaccgcccattttattttattttatttttttgtcataatttggacaactgcctactaaaaaagtcgaactcaacgtggtgttcacaattgggcctataaagtttaacacaaatgggcccagtttttagtaatccttttatctcagcgacgccgtttatctaactatcccacattttgctgcaatgtgaagaatgttttttgttttttggtttttggttttaatgtgacaatgtgaagaatgttctgaacacatgaatcaacatagcaacagaagctccattctctagctctagagagtctccacacaatatattatgtattttgacaaaatagagtacatggaatgatggaaaccataaataaaaactcatagataaatcacgaaacaccgaaaagccaataacgtttaaacaacatcttaatcaaacagatgaaatgatattatttctttaaagacattttttaggatattttacctttcgacttagttcgcgacataaagatggacggtctcctgcttcttctcgcagacaatatcaacatcatcttcattaacaaacaacaacataaagtcgagataacatttagtaattctttgaagaaaaggagtgcccggaaactgagggatagcgtaaggggcaaggagataagctaccacaaaaaggaagatgatagagataaagataatgctatcaaaaagccaaggattgtgctttgttgtagccaccacgccgc

SEQ ID NO: 26326 - DNA, 509 bp, Arabidopsis thaliana
ttctctctgctgatggagttggatatcacaagtcttgcttcaaatgcactcactgcaaaagcaggcttcaggtctgattctctcatctttgtattcatgttaacgatgctgctttaattagaggaatgagtttacgaattacccatcttcttgcttaaatgatgaattgaatgtctattgtaaccataagcagctcttgataaagtaaatgtctttttacagctgagtagttactcatcaatggaaggtgttttgtactgtaagcctcattttgagcagctctttaaggagagtggtagtttcaacaagaactttcagtcacgtatgtagttttgtttctgcttcgattcatgtttttttccgcttgcccttcttttggttattgatttaatcagtcttgcaactttgtttcctcacagctgcaaaatcggctgacaaatcaactcctgagctggtaaatgtttcttttctggtttggtcagatgctctttggatacattttctgattg

SEQ ID NO: 26327 - DNA, 533 bp, Arabidopsis thaliana columbia
aaaaggagctcagcagaaacactaagaaaatagaagcagagaattgttttgacagaactagcgcaatgaaaatgaaacaagacgcacagacaaaaactagtcggggttaaacataatgctgattccaccaacatggaccccaacaaagaatttcccatgcatagatagtacgagttttgtcagacgtatattttcaaagtttttcatacctgcaagccactgtagtcaaactctgagccaagtggaggaagcgcacatgccttgtttctgtcttttcatcctagatgttccattctcttcagaaacacagtggttttggaaatcataaaataaaaactgccactaactcatacctttggttcagaatccggcgtcctaagattctccacatggcaccaaattcctcactctcagtgaccttcatctgttcattctctagagcagggggaatgctgccagtgccaccccatccttttcagaaaaattaccccataatcttgactaaagtcactgaggattacaaggtttgttga

SEQ ID NO: 26328 - DNA, 587 bp, Arabidopsis thaliana columbia
tgagaagttttacactgaggtccaagagattatacttgctaggttcaataaaaagtttgattggtctctcaaggctaaaatgatgggtagaaaagcaatagaagctgccaggatctttgttgaagaaagcgggattagcgactctctttcagctgaggactttcttgtcgagagagagtcaatgttgcaagaccttttcccctactagtgagctcatgccaggtagattctgctttttgtaacacatgacatttggttcacaggaagattacatgtacggatatttatgtttttgatgtggtcatgaaccaattctcttccacattttcaggggctagtagactcattaagcatctccatgtaaagaatattccaatatgtattgctacagggtaatctcttcacctcatctcataatataccatttagtttgcattctcattgtcctttacaatccagaaactgacttgttatgtttgattgtacgcttgcagtactcacacacggcattatgatctgaaaacccaaagacacagagagcttttctcattgatggatcacgtagttcgtggtgatgatcagaggtg

SEQ ID NO: 26329 - DNA, 423 bp, Arabidopsis thaliana columbia
taatctgtttggattgatgcctgagatctagtcttgcttgtagtacataagttgttcctacggtgtagtatatgaacggtccttggatgatggtagcttttttcattcaacttgctctcgaatttcagttaggatttacaattttgctgattgttgcttacagtctttgtatttagctaacacttggtagcttgattcctatcttcttgagtattagtgaacagtaactaacattaagaagctttgtgtagagaacattctcagagtacactgatagaacttcctttgagaggcctcttactagcggggtagcttatgctatgagggtgctccattcagagagggaagagttcgagaggcaacaaggttggactattaggaagatgtattctcttgaacaaaacccagttcacaaggatgact

SEQ ID NO: 26330 - DNA, 608 bp, Arabidopsis thaliana columbia
aattctttcacatttttgtaaccggtacctaattcatattatatggaaatttaattttcacacgtaacacttttggcgttattcatttcatcattaatacgttccacatgtctttacttatctctattgaataagttctcacgtgatttcatgtgtaacagagcggaagagtatttcaagagagcggtaggagtggaaccgaaagatgcagaggcgtttagcaaatatgcgacgttcttatggagagcacgggacgatctttgggcggctgaggagactttcttagaagcaattgatgccgatccgaccaactcttactacgccgctaattacgccaatttcttgtggaataccggcggtgatgacacgtgtttccctcttgatgacgagtctcatgaagacaccatttagataagaatgtgcaccatcaaagtctctctatataaaatattgtatacaataagtacaactaatgaatatacacatatgtgcataccattaatgtattatgtatatgcatgtttgtcacaaggctcggtgggtaaagagttatataatcttatggttgcgatcagctagagaaaggaagaaatatcttggttggtgta

SEQ ID NO: 26331 - DNA, 552 bp, Arabidopsis thaliana
caagaaaccaaaaacaagctttgttttcctctagaccaatgagcttgttgtgtctgtttatgtggcagttctcgagtgcttaatgagccaatcgatgaccgcatcaatgtttatcgagtccttacacgagatcatgtaacagcaaacctctctgtctgttacagattcaagccctctgcatcaaaaccaatccaaagtcatatactcgaatccagattgttttgtatggactttgaataagaaacttacagttgatcaaccaaagcttgcttagagagagcttcagacttatcgattttgttgccaagaatcagaagaggaatgccatttaaagacggtttcgttagcagatcattcaattcgcttcttgatatcggtacactatctcgatctgcagcatcaatcacatatctgcaatattaccacagcaacatataccatcaaagattattaaccaaatagtaacatgggatgtcaaaacatatcgaagaagttttaagaggatgtcacaatggcggaaacacgcgacagtaacgtcccacatggtacgaa

SEQ ID NO: 26332 - DNA, 586 bp, Arabidopsis thaliana
ttctttttcattttactgaaaattactaactttgtgtttttttctgtttgtttgttttgatttaggtactgcgaatcaccagcttcaccagttggtactcgttgtatgcaaacacggtcacaaggaaaccaaaatctcctattcaacgataacatcgaccgtattgctcgccaactcagaacacagacagaaacagacacaatggatgcagttgtagatgagcaagtgcaaccaaacaacatcgttgcacgcgatgcaccacgcaaccagaatcagcgtaatggcatcgtgcctccaccagtgcagaacaacaactttgagatccagagcggtcttattgccatggttcagagcaacaagtttcacggcctccctatggaggatccactcgattacctggacgagtttgataggctctgcagcctaacaaagatcaatggagttagtgaggatgtcttttggagagaaagcgcatcagtgggaaaagtcgcttcctcaaggctctatcacctcctcgaatgactacaacaaagccttcttggcaaagttttctcaaactccagggttgcgagactacggaatgata

SEQ ID NO: 26333 - DNA, 1070 bp, Arabidopsis thaliana
tagtatttatggcctctgcattacctgaggtggagtatatttctagtgagtactatattggtaaaagaatctaaacatttaacctttttgttaaaagaaaatctaaaaactcttactgaagaaaccctaaaataaattaaaccctaaaacgaatgtgctttcttgatcccccattgtagctagtagtttaatattacgtgggagagtgctataaaaagtccaacctaacgctccatacatgcgtagatcatgtttcaaatcataacttagttttcgtttcctgtaacaaagcttccaaattatgttcctttgtctcgagtttagcccggaaccgtctaatactatttaaagtatcttcaacgctctgtttcaccttagccacatgatcaaagataaagcaagattgcgtttgctgcaacttttcttgatcaccagtagccttgttagatgaccgagtgcaacgagatggccctccttcttcatctaacttctgcctcacgtcatgcttctgtctactccccccgctgctactttggactcgagatctcttgtgtggccgagcctctgctccagcctttgggcggctgcagagccgaaacacgggaattttcgggttgcggacagtttaaatgtacaagaatctccaacttctaatttatttgcagtgcagagacttgtccaacctccagctataaaaacccgaccagacttgtaacttttaacttctgattcccatgtatttccttcttcgtccatcaaaactatctcatgcctacctatgttcaaaccatatcgctttgcgaaatctctgggaataccctgcagtagttatcaaacacaaacacaaacacagtcacacatactcaaactctaaaatcgatatatggaacacaatcataactaactaaccactaaatctctcgttaggtttgaagcggtcacagattggctaaaacatgttagatctggtgaaaactgatcaggttctgttttcacattctcctcaataattttctcatttcttgaagattccctgaagcagaaatctaacgcttaacacatagtaaaga

SEQ ID NO: 26334 - DNA, 572 bp, Arabidopsis thaliana columbia
tgcgacgaaaaaaaaaaaaaaaaaagcttgctcaaattgagctttaaactttttaacaatctctctgtttatttccttttggacataagaagaactaagagatcaaacaaatcaaaacttagtgtcaagattgattatttgctttttttcttttcttatccccaatgctcattaatctttctgagaggcggcacaatttagacacaaattggcaaactatggatactatgcaaatggtgatatccgcgaagtcgatattgtgacaattatgtcaaatcacttgaaaatgataaaaccatttatcaaaaagagatgaaacaatttaacaaagaaaaaatgagaaaggaaacaacaaaagcaacgctatggttcttttagtagtagcgattacagtaaccacagatttttctgctagtacttagtctagttatagaagccttcattatatccacggcaagatttgggtgattggcgacaaacagcttgaactcatcaccactagcaatcgtacttatattggttatgatagtagtgaaggcgggatcattgagggctttgtcaaaagggatttg

SEQ ID NO: 26335 - DNA, 475 bp, Arabidopsis thaliana
ccaccgcgtggctaggcaagacaagaaatggagagtgatcatcggaagcaagattcaccgtcgtggactagccattacttacacgagtaaagactttctaaaatgggaaaaatctccagagccgttgcattacgacgacggaagtggaatgtgggaatgtcctgattttttcccggtcacgaggtttggttctaacggcgtggaaacgtcttcgtttggtgaacctaatgagattttgaagcacgtgttgaaaataagtttggacgacacgaaacatgattattacacgattggtacgtacgatcgggttaaagataaattcgtaccggacaatggtttcaagatggacggtacggctccgagatacgattacggaaagtattacgcgtctaaaacgttttttgactcggctaagaaccggagaatcttgtggggttggactaacgagtcatcgtcggttgaggatgatgttgag

SEQ ID NO: 26336 - DNA, 606 bp, Arabidopsis thaliana columbia
tttcagcaaaaagatcaaatatctccaaactttcaaatgatgtttgttatatagagaagtcattacgtttgtggagaagtaagtattatacagtcttgtgtcaatgtatgtgtatagagtctgtagactataaacgtgaggatgatgttattaacatacttgaataacaatcctggttatttctcgtggaagtactgttttttttaatatacattcttcttatatacttgcaaatttattagaatcagcttcagacttacattttcaatagaaatcaagaacctgcgagaccttataggtttaaatcttttaccgaccatgagagacaaaggattcagtgaaggtcaagggagcgatggaacaggactctggagaatcagctgcttcacctgagatttcagtacctcgatgaacttctcgagtttgcacaatgtcaagtaagttatgaggaagctgagccacactgtccaataattgaatgacgctagacatgtttggtctgatggctgctactggatgagaacagaataagccaagtttcagaacaagtgctgcttgctcctcaacatattcctgaccaatcttatgatcaagaacctgcatgat

SEQ ID NO: 26337 - DNA, 646 bp, Arabidopsis thaliana
ccatacacacttctgtgtgaaaagtgtgtatatataaataatcacatcatcacaagtctttgcttaaaacattttaaacctctctctcttttctctctacaagttcattttctttctctatctatctcctctgttttttttgttcctctgtttttttcttgctctgtttcaatggaggaacaaaactggataagaggaccaatcataggtcgaggctcaacagctactgtctcacttggaatcacaaattccggtgacttcttcgccgtcaaatccgccgagttttcttcatcggcgtttttgcagagagaacaatcgattttgtcgaagttgagctctccttacatagtcaagtacattggttctaatgtaacgaaggagaacgacaagttgatgtataatctcttaatggagtatgtttccggtgggagtcttcacgatttgatcaagaattccggcgggaagttaccggagccgttgattagatcctacacacgtcagatattgaaaggtttgatgtatcttcatgatcaaggaatcgttcattgcgatgtgaagagccagaatgtgatgatcggaggagagattgcgaagatcgtcgatttgggttgtgctaaaacggtggaagagaatgagaacttggaat

SEQ ID NO: 26338 - DNA, 1207 bp, Arabidopsis thaliana
ctatattttggtctcctcttcataatataaaaacattcaaatagaaaaaatggaaatgattaagcaaccaaagctctaaaggactgatgtccttgtttagcaaatacacatccccgatatatgcatgtctcatcgtgcataacatcaattgaggtccgtgtggacacctttgtggaatgagcttgtgcaaaactagttgatccgatgttcgttgattcatcagtataccagatacaaagatagcgcattgaccattgatttcggagactatggtcgttcatcgagagtttttgatgatcagttgatttatgaagtataccgatcataccaaacaagtatattcaaaacatccttataccttgatgaattgtgtatatataaggaaagaaaagccattagccgaaatgtgtcatgaacctaaatcctaattattgcttgttagaaacgagacttatatactattaaaaccaaagaaaaagaaaaaaaacttaactatttttaaggacgaagtggcttaacgttaaacaaatgtcacagacgactcgttcaatgctatagcattaagcaaacaaaccaaacaaacataaccaaacccaaaacacactttttatttttagtaaccaaaacttcctaacactctttctctcacaccaaacacacattttccacacactataccaaataaaactgaactctaataattaaaataacctttgaaataagtgaatttctcttgtctctcgctttcttgtttttttttggtatatgagaagtctcacggcggagatattcagtctccggccaccgtaatgtcgacaataattccttcacctctggcaccgcaacctccgcaacaacattacgttacaccgcctctcacgtgatcctcaccgtaatcctcctcgttttcttcttcatcggtttcttcactctctatttttgcaagtgtttcctcgacacaatggtgcaagcttggcgtctccaccacggcggagacaccgtatccgacaatcccctccagcaaccggaagctccaccggtaaatcccggccttgaacttcgaatcattaactcatttcccacttttccttactcctccgttaaagatctccgggaagagaaatacggcctcgaatgcgccatttgtcttctcgaattcgacggagatcacgtgctacgtctcttgacaacatgctaccacgtgttc

SEQ ID NO: 26339 - DNA, 517 bp, Arabidopsis thaliana columbia
ctaaagcgctttaaagtgagctaataataccataagttatgatcatgtccaaagaggatcccaccacgacattgatgaattattgttgttgttgttgtcctcaaggaaccccaaatcattgctctcttcgtccgggctactaatgaactcatcgccgctttcaaatgaactctcaaaggacatcttctgttgtccttgctcttgtactgacaactttgtttgctccatattatatatcaattctagtagacttgatctttggagttgcatgcctactaactctacttgagtttttgcaagttgtgcttgaagctcactcacttgtctctgcaaatgataaattgcacccgcacatccgtaaaccggatctctcatcctagctacggcttcatagaccatgctattaacagcatctgttctttgcgattctggaagttcctgattataataaatatataaagaagattaacacataaatatcatctttcacttattcatgattttctagaagaggata

SEQ ID NO: 26340 - DNA, 565 bp, Arabidopsis thaliana
cattgccttttacccatgttatcaacgctctggttcaccttagccacatgatcaaagataaagcaagattgcgtttgctgcaactttccttgatcaccagtagacttgttagatgtgcgattgcgacgagaaggttctccttcttcagctatcttctccctcacgtcatgcttcgatctactctcttggctccatctttggactcgagctctcttgagtggccgagcctctgctccagcctttgggagcttgctgcagagccgaaacacgggcattttggcgttgtgaagcagtttaaatgtacaagaatctccaacttctaatttactttcagtgcagagacttttccaacctccagctacaataactttaccagacttataacttataacttctgattcccatggctttccttcttcgttcatcaaaactatctcatgccttcctatgttgaaaccatatcgctttcgaaatctctgggcacacctgcatcagtcacaaattgcattggggattatatatactacacatacttaaactgtaaaatcatatatggaatatagta

SEQ ID NO: 26341 - DNA, 483 bp, Arabidopsis thaliana
tgttgtggtgtagatgctcgatatatgtgggatcaaacatttggagtctaagaagaggaagcgtgaactttgaaagtcttatctcgttttttgatggctgggttaatacttggatatggtacgttcataagctttcaaatggagagcctcatgacgatagttttgatccatatcgtgatcttgttcgttgtttttctccatcagtacttcgttttctcgttgctttgataccgcttcttatttaggttatatataggtttggcttgaaaccgagacatcctccacacatggatataaagctgtctaaagctgattcacctttgcccaattgacgaggagtttgatgcgtttccaagcgcaaaatctgatgatgtctaaagaaaaggtatgataggttgcttggggtctcagggaggatggtctcatcgtgtcgggagatgtggctacacaaggaaagatattgaaaagtttgttgaattggag

SEQ ID NO: 26342 - DNA, 550 bp, Arabidopsis thaliana
tcatactctcaagcttacttgtatgctccaaattcaagtgaattattttcttcaactcttgtatacccttagacaaatgacgtatcccagtatgtgacaagttgagatatttcaaagaaactagatttgatatttcttccggcaattcaaagagactttgattatgcgatagatccaaaacagctagctttggcatgcaattgaagaattcactcgagatcgtttttatttcactccatctccaaatacttccatattctccctctcccaggagcaaagttgtgagttccatacattcataactaccaacgagatgatgaatcttgttctccatcaatgacatccttctcacaacattccaattcttaatctttggaatttcacgtacgccaacacctgcacgcacaatgaaggcctccttttgtattcccagttcagaagcgatccataaggccatttcacgaacaacgtcatgcataatcacactagattttcctttcaaatcaacacactccatcaacagtgatgcacgaacaagactaccaatgat

SEQ ID NO: 26343 - DNA, 427 bp, Arabidopsis thaliana columbia
ggaaatatttaatgtgaaatatttaactatttcccccccgctatcataccacatatgtacatatggctcagtgaatgcaaggcaaacccgctcgctctgtgaacagtttaatatataaacacctaattacatttacttagatgtgaattataaaacaccaattctatacgatgaagagggtagcatcttacaattacaaaactgtgtgtatggtcgtaatgacgttgtttgtgtacggatattcagccgcagccgaacaaatagcttacaccataactgttgatcttaacggtggcggaaattttacgaccgtccaaagtgcaatcgattcaatctctcctcccaaccataattggattcgtgtcttcacacaaaatggaatttaccggtactagctactacgatatgatcttttgtaacatatata

SEQ ID NO: 26344 - DNA, 545 bp, Arabidopsis thaliana
caccatgattagagatagatcctcttaaaattgggaacagatttaaatgctctgagcttttccattgctccggttctcaatttatcatatgttgtggatctttatgatctgaacactggtatattgccattttgatcctcttttccacacacaggacgtactaaaaagtctgagaattcccagggctccggttctgaagatgagctttgacagaatcaacttgaagtatgaggtgatcgtcaaaacaaaggagccgctgaaacagctccaagagctgctaagagatcggttcaaggatcagtctgggattgtttactgtctctccaaaagtgaatgtgtggatgttgccaagtttctgaacgagaaatgcaaggtgaagacagtttattaccatgccggggtgcctgcaaaacaaagagttgatgtccagaggaaatggcaaacaggggaagtccgaatagtttgtgcaactatcgcatttgggatgggaatagacaaagcagacgtggtaagtcaagcctatgcatagctgtttgttgcaaatt

SEQ ID NO: 26345 - DNA, 498 bp, Arabidopsis thaliana columbia
tccggaaaatggttttagagcattttgcgcaagaatgttacgtatacttgtggtccataggaaaatgaattcagtatgtgtaggtatggtagcaatggctaatacaggaccggatgctaatggctcgcagttcctgatcactactgttaaggctagctggtaagctctacgctcataataactctcatgcacaatgagtgtaagaactccaaatttaaggcaggcacactcagtttcacttatggtcttgcgaaagtcatgtaactatcctctgggatcgaaccttgatgcaccatggacaagattatgcattcgaattgtactctagaataacacgtgaattctctacacatgagatcatcttgtggatttcagtgttgactttgtacaaggtaaattgtgatgattgtgatgactgtgttgcaggctggaaggacgacatgtggtgttgggtcaggtgatactaggaatggacaatgtattcgccattgaaggtgg

SEQ ID NO: 26346 - DNA, 549 bp, Arabidopsis thaliana
cccatttttaaaacatggaacaaaggcaaaagaaagagcaacatcttagtttgtctcagctttatactcgctaggtaaagacttgagtttctctttgacatcagctgcattagaagcatgaaccgcagcgcctaggaaaacagcgatcaagaagcaacctacgccagggaagaggatctcggctttgtttatcttgttgtccaagaaataattcaatgttgtacctataaaattcaaccgtgatacgcaagaaaccatagaaacataagtttttgattcatcacaaaccaaaggaagtataccaatgacgacggtaatgcttgcggttataacttcagtaaccgataaaccgacaaacgcaaaagcgtattgagtcgctaaattcccgatgctaagaagcacaccgcctgcgactgcaagcaataccgacggccaattatcctgtaaaaaacctcatattaccaatcaagttcgtataaactttatcaggaatctcaagaagtatatagaacgaaccaaacctgaggtagctgagtggtaaagtcaggt

SEQ ID NO: 26347 - DNA, 405 bp, Arabidopsis thaliana columbia
gaaaaccacaaacgatgcttctggctcgaaagagcttggaacatcaacgacttgtttctttggagtttctatatcttttcccagaatgtcggttctcacatggttcgtgatgactgatgtgtaatcttccatgtacttgtcaataggatcaagagcaaagttatatcaaaatctcccagcatttgaggaactgtttcttgttgatcttcagagattcgcggactttctcaatggcgttcagaggcggggtgaatcgaggtatctgagctttctttgatagctttccttttgtgagagtctgaacagctgaatcaatgtctggtttgattggatcgaaactgcgcaacgggtttatgtctatgcaagtgcggatgtgttggaacttttcagatggctcctcaactg

SEQ ID NO: 26348 - DNA, 476 bp, Arabidopsis thaliana
tagacatatactcatttttaaaaatttaataattttcttggaaaagataaagatccgtttgtaagataattgtgtaacacaaaagtcacctttttggcttaccaataacaaagttttaataagcttgcatgcattattgttcaaagactatctaaaggtttttgaaataataataaatcattttagaaaaaaaaacaaaattatacaaccaatcttgtcggatgtatttttaataatatagactgtcttagcttatgttcggtggtgcttacactaaaaaattaaaatatttcagtgaaactacttacaataagttaaaaaatatttcagcgtttcttaccatcagaatttggaatggatccgtcacgtatgggacatgccatgccaccaggaagtgaaacatttgatcaaaaaatggaaatacgaaatgcaattaaggccgccgggatctccacacatacctcgtcggtgcttgt

SEQ ID NO: 26349 - DNA, 555 bp, Arabidopsis thaliana
gcttttgtttcggttccctgtgtgccatccattgttaattaggtcaagagatgacaactgagaattaacgttacaaccatcaaccagtacttagctatgttcattgaaatagtttgatttctcatatcttaacaccgactcacaataagtaagagctgtcatttgtttgtacggttaataattttcatggtatatctatgtagcttggattatcctctcatgttctaatggtgtgatcctggtttcctgggacttatgcaccagggaaattacgatattgtgccatcaactcactttcaaatttttgcatgcaggttcatatggatcaaccttaagatacaagaacatcgagagagtgaaggctattggtaagcattctcttcttggtgccagcggagcaatcagcgactttcaggagattctccgttatcttgatgagctcacgtaagaatccgtttggttcaattttctcatatgtcccatcttccttgtcaattatcaagcctcacaagcccttggctttacacagcctgaatgataacatgtgggatgatg

SEQ ID NO: 26350 - DNA, 597 bp, Arabidopsis thaliana columbia
tcagtctcaaaaatggtgtttagaagtaccttaaagtaatgatggccttacttttctgccaacaatttcttccgcagagtgcgagatgtggatatgaagcgagattatgctttcgttgtaagtaaaatctccttttaacctgagctttcgatttcttgaaaaagtcatgtagtacgttttttagtcggaaccaatgtataatgtgggaaaacacaccatgcatgtggtctcttttgtcctcacattttcgaaatcaggaatttggtgatccccgtgatgctgatgatgcaagacattacctggacggacgagactttgatggaagtcgcatcactgtggagttttcacgaggggtgagttgtttggctctctattttcaggctctatcatttgtttataggtatggttgaatgtgtttgccaaactcattagaaatcaatattatgtttgtatgataggcacctcgtggttctcgggattttgatagcagaggccaccacctggagctggtcgctgtttaactgtggtgtagatggtcattgggctcgtgactgcacagcaggggactggaagacaagtgttctgttgtggagagag

SEQ ID NO: 26351 - DNA, 582 bp, Arabidopsis thaliana
ccatgtgggaactatctttgccggtagtgttgatcgggatcataggtactgtaatccattgggttacttgccgcaaaaggagaaagttggacggcttggacggtgtttggtgatcggttacggcggagacacgtcgttggatcgacaacaagatttcgtgaatttgttggttgcagctggagttagggttgaagcaaggtttgacgacgccggtttccatagcatcgagctggtcgatccacgacgagccgtcgctcttcttaatatgattagagattttataagttgattattcttttcaagttttcatctaagcattctataaccgttaattttctcattttctattttgtatacatatgacattttacattgaacgttgttacatagcacaaatgttacttcttttgtgttttttgataaaatgttaacattgttacttcttattgtattcatttttacaattccacaattccgtaatttcacaaatttactaattgaaatccatttcattctcaatcatacttaagtagcctactgtagttgaattttaagccaacttgtgatcagctttaaaacaaa

SEQ ID NO: 26352 - DNA, 599 bp, Arabidopsis thaliana columbia
tattaattcattgatattatattaacatgaaaacttgacgtctcgccaccaatataatctctaacaagaatgtgaagaaacaacactagtgcatgcaaattggctccatcatgccatttaccaaactccaatatctatttcctctaatataactaatgaatgaaagaaaatggtagagaaggggagctagataaatggtaccaagataagagaaagggctcgtcgagatcgttgtgaacattgatgatcaaattgtcattggtgactgagtaaatatcgggtcctggatattgtccgtttatcaggattccctgcgtgtatgaatagaatataaagcatgcatgatcgagcaaacaaaaacagaaagcatcccgccatttttgtggatgttggaaaaaaaaaaaaataccctttgaggaatgccaagtggagaaatgttgccgtaagtgactctccagtcgaaaaaacggtagggatcatcagcttgaacaaaagaaatgatggatatcgtcatcatcatcatcgtccaaacggccccatctagccaccagcacatactcgctttgacaagaagaagaagaagatatagttggaagaga

SEQ ID NO: 26353 - DNA, 221 bp, Arabidopsis thaliana columbia
tgactccgatgaacggaaaaggaaactgcagcgtcgccggttgcgtactgaatttgaggccacattgtccgcagaagctcgcagtgaaatcaaaggggaaagccaaacggggaagaatgcctgggaaggggttgataaagaagaataatggtggagaagagtttatgggaaacccagttgtgtgtcaccaacttattactcagagatctttaaacaagctt

SEQ ID NO: 26354 - DNA, 285 bp, Arabidopsis thaliana columbia
agtatgctcctgagttccattgacaacgtattttcatcatgaaggccgaatcattggaaagatcacaatttaaaaccaaggctgatgaagggggcgatgattcttctaatgttagtgctgatacttctaaagttggtatgcattgatcgatggagaggcaaatggggcttcaaattctgatcaggtatatgtttcactttttgatctggatagatatgtgcattaacgatatgtagtactgattgacagttctgattcaaactgggattgtatgaatatttagga

SEQ ID NO: 26355 - DNA, 477 bp, Arabidopsis thaliana columbia
ggtaagacttatctcgaatctccaacacaataatctcgtccgtcttcttggttgttacgtggacggaagttatgcttgtctacgagtacctcgagaatggaagtctcgattcttttctattcgtttaggacatttcactgtcctttcttatcttcttatagctgtgttagtggaatgttctaaagtatgtgttttgctgtcgaccaaagccaaaaatgtaaactgaattagcagacgaggtttgatatcatcaatggcatcgttcgagcaattctctatcttcaccaagactcccgattgagaatagttcatagggatctaaaaccaagcaatgttttacttgacaaagacatgactccgaagattcgggatggctcagatctttgcagaaaatgagactaaggctaacacaagtaaattggctggaacattgtaagccaactatctcacgatgagaaagctctcaagagttatgag

SEQ ID NO: 26356 - DNA, 556 bp, Arabidopsis thaliana columbia
taaaaaggcaattgtgcaagacattaagagagtcttggataattatggatcagtgtttcagatgccaaaggggcttcctccttcccgtaacagggaacatgcgatcactttgtaggatggtacctcatcgattaatctgcgttcttataggcactcttttggacagaaaaacgagattgaaaagttggtcagagagatgctggactctcagattatacgtccgagtataatccaatactcaagcccagtggcggatccaggatatgattctatataaggcacagttaaaaaaaaatcaataaaaagacattagtaaagcttgaacttgggttaatgtggggcacattaagtaaaaaaccactacaccaagtacatttttaactacatagtgcaaacttatataatatttattgaattcagtatagggcacatgcccacccaagaccaacgtggatccgtcctgctctagccctatcctactggtcaagaagagagatgggggctggagattctgcgttgattctagagcgctcaacaaagctactattccggatag

SEQ ID NO: 26357 - DNA, 1570 bp, Arabidopsis thaliana
  unsure (1)..(1570): unsure at all n locations
ctatcctccttgctttttttgtgtctgcgttacacaactcattaatggcctctttgaagttgaagaaaatggataatggcgctgaacccgacaagaaaaagctggtcatcgccggtattcgccaccagttactccttctccttcgccgccgtcaccgtctatttccgctggtatctgccgtctccggctgtctcctcctcatcctcttctcattctccaccctctctcctcctccattgatccatcataacaatcaagtggccgtcgaacccaatgcaaccactccatttcgtgtacccgtacgtaaactcttttttgtttcattgaggttttacacaaactttccaggtcattcatgatcattaatgcgtgtcacaggaaaatggcggaaggtcggatcgccagttatggagctcgagattgtccaacttgtactatgcctgcagtaatgcaactgacacctttcaaggtaaagatttgatccatttgcgtaaatagacgcgaaaaccagatattccactctctgcataaattgacttaaattgaaattgtggcagttacggatacgagaagccaaaccaatcggtatttactgatcgcaacaagcggagggttaaaccaacagcggacaggggtgagttcctccttgtgtgttatgatgcttcttcaagtggttaattcatatatatatttctgattaagtttggtttctactgcagataatagatgctgtagtagcggcatacattctaaacgccactcttgtggtccctaaacttgaccagaagtcgtactggaaggacaccaggtccctgccctgtccctctctgttcccattttaaaaatttgttggttcgaagttctaacacacaggttttgttttgaattgttttgtggtacgcagcaactttgaggatatatttgatgttgattggttcatatcgcatctctccaaagacgtgaagatcatcaaggagcttcctaaagaagagcagtcaagaatatccaccagcctacagtcaatgcgtgtcccaaggaagtgcacgccttcttgctacttgcagcgtgttttgcccattcttactaagaaacatgtcagttctcctcttccaaactatatctatcatgattgtacatatgctcatctttttctaaatgttgcaggttgtacaactctccaaattcgattacaggctgtccaacgctcttgatacagagctccagaaactgcgttgtagagtcaactaccatgccgtcaggtatacagagtctatcaacaggatgggccaattgttggttgacggatgagaaaaaaggccaaacattttgttgcccttcatctcaggtacacacatacaaattaatatcttaatatgtaataacatttttcaagtgtgtagctaatcaatgtgcatgttggtcctagattcgaacctgatatgctggccttctccggatgctattacggcggtggtcaaaaggagagactcgactcggagctatgagaagaaggtggaaaacgtacatgtgagacatcatgcgatgcttaatttgaatanataaatgaatg

SEQ ID NO: 26358 - DNA, 483 bp, Arabidopsis thaliana columbia
aactttcttctttagccttctgtccagctgacagcacaatttcaaaaggaagaggagccagagatgaccagtattcgtacttggacgtagctatatccgaacatattcctgaaatgcaaatatgcacatatgtcaagaagcaaagatacacgatggcatgaaagttctagttatgtcgttaagcagatgtttgttactccttaccatatctggaagctagaccccaataccgagctagccagcaccgcttaagaacaacttcctcctgaaaattttgcaaggctgtgttacttaatccctaccataagcttatgtgtggattgcgcaaaaacatgaacacaaaccatctcattttgggtcaatatcattctatgcgtcattgtccgtagaccattgacttcagattctgctccttgaagttgtgctactatagcagcggtctccagttttgcagtctgattaagagtgaattatagaaaatat

SEQ ID NO: 26359 - DNA, 654 bp, Arabidopsis thaliana columbia
aacataattgggtcgggcgggtcgggtttggtttatagagtgaactcaaatcaggtcaaacgcttgcggtgaagaaactctggggagaaacgggtcaaaaaacggaatctgaatctgtttttcgatccgaagtagagacgttgggtcgggtcagacatggaaacatcgtgaaacttcttatgtgctgcaacggcgaggagtttcggttcttagtgtacgagttcatggaaaaccggcagcttaggtgacgttttgcattcggagaaagaacatcgtgccgtttctccacttgattggacgacacgattttcgatcgcggttggtgctgctcaaggactttcttatctacatcatgactctgttccgcctattgttcaccgtgacgtcaaaagcaataatatattgttggaccatgagatgaagccacgtgtcgccgatttcggtttagctaaaccgttgaagagagaagacaatgatggtgtctccgatgtttcaatgtcttgtgttgctggatcctacggctacattgctccgggttcgaattcttagctctacaatatcaaatcgttaaaaccctatacgcaagcgttttagtaacattactgttcttctgtggatgcagaatatggttatacgtcaaaagtgaatgagaag

SEQ ID NO: 26360 - DNA, 564 bp, Arabidopsis thaliana
cagtctgctttgtgctctgcatcagaaacttccctgcaaacagatcacttgcactttctctcacagtgagctttaatggtgtaagtgctgctttatacactcttgcttacaacgcaatcaatcctgtttctacagagctatacctactcttaaacgctcttgtacctctttttgtctcatttgctgcactcatccctattcttcgccaaccgcctcttgaacctcttccaccagatggagttcgaagagactctctcatgtttctattgcttaacatattagcggtcttgaacggtgtttatctgcttctctttcgttcaaagacttctgatgtaacttcagctcgtcttctctttggtggatcaatacttctcttgattcttcctctatgcctccctggtctagtctacgctcgcaattggtatctacacaacatccactccagcttccgtttagaaggttctggtttcattcttgttgatgttgatgagcttgagatgcataaaggaatggtgacacgtgaagccagccttgaaggctaccagttgcttaacgatgatgtag

SEQ ID NO: 26361 - DNA, 769 bp, Arabidopsis thaliana columbia
tctacatgtattttgtttgaaagaaaagtaaacaaaaaaaaaacaatagaaaaagagaaagacgcaacatgactttttttttgtattgatattgtagagaggatggcgtaagaagaagtctgtttgtttcctaaggttaatctaatcattatatatttggaatgttttgtttcttacagagatatcttagcacaaaattctgaaaaaataatcagaagactgtggaaaaataaattcaacgaatgtgaccaaccactacaaaacaaaacaacattataaaatctaggtttcgaactcgcaaatcaaccaaatattatgcaggtcttttctactctgtgggtaaaccgacagaaacagcgacgacgtttgttttatttcttttaaactgttcacatttgtttattgttttcctcctgttgaaagttaacaattcaaaaatttccagtacatgtgtttctgttctcttctcttctcaaaattttttgtttctttttgtctcaagctatgaacttccatactttgaatcttctacttctctttcttcctcttacttgatcttcctatagcatacttccatcatgtaagttcctttttgtatttttatttctcttacttgctaaagttttatcttcacattttttgatgattagggttttggtttgagattaggggtgaagatgatatagtggagctcttatggaacggccaagtcgttcgaaccagccaaccacaaagaccttcctcgggtaaaccttctcctactccaccc

SEQ ID NO: 26362 - DNA, 829 bp, Arabidopsis thaliana
ccattcctatgggaagaagcaacgttccacaaacaaacggaagcgccaaggtatcccaagcgttccttggccgaggaatgtgagcgtaaagcttagacaaaagagacacagagtcattcctattgtgctcacataaagcagcggtttccggccaacactatcaatcaggaaggtggcaaatagtatgaacactgttttcgtgacaccaacagcgacagttgcagcgagcagtttggtctcgtcttgtatcccagcctctttcaggatctctggactatagtagactgtggcgtcaattcctgtgatctgctggaaacactggattccaaatccaacaatcagcattttccgtacaacaggagatgggctaagaagctcacgccacacgggcctgtcctcgctgccttctgtatgtgcagccgccagttgtatctctgcaagccgctcttccgcttcgtcatctcgctcattcgttttcatgagcacctctcgtgcactgtccactcggcctttcatcaccagccacctcggcgactcagggatcacacacagcgcaaatcctatgaacaccgaaggaagaatcccaactgcaagcatgatcctccagctgatatgcacggaaagccccgagaaagcgtagttcgaaacatagcccagcaagatccctagatttatgaagatctcagggaacgaagtgaaaaatcctctagctacggtgggggatatctcggcgatgtagacaggagcgatcatgacaccaagcccaatcccaatgccggctaaagttctcctatcatcaaaacatcgaaagacggagcgacagcatcac

SEQ ID NO: 26363 - DNA, 569 bp, Arabidopsis thaliana columbia
cggttcttccagcgacaagtacacgtccttctaatggtttacattttttcttgagcagttgagctttcctttcatcaacaaatccccctagagacttctctactacactttaaaaaccacaaaacgctagaacaatcattttttcaggaaaatactatagtacataaggaactaaaagtctttgaaactaaggaatgtaagtgcttgtgcgtctctaaataccttacccctgaacagtatgtaagtcaggctgtttctgccatccatcaaaagaagccccattatacgaaagaacgatcttgaaattcactctttcccacctccccgacctcccgtctttccgagtagaagtctccggttccgattcaagaagcatctcttcagttatcccatcatcatgaaccaaagatttctgaattttgaacaaatcatttacatcagaaggatgatacaatacaagccatcttgacacaactgaataaagacttgtacttggtgctaaaagatactaactttaggctgaaacaaactcaggacagaaagattccgttctactgcatttgagtaga

SEQ ID NO: 26364 - DNA, 712 bp, Arabidopsis thaliana columbia
acactggtactagagtgatgatggtggtaaggtagttgagaaagaaagcctttttagctttgctaaagtccaagacaagaaaccaaacatctttttgtacacaagacaagacaacaatagcagtgtttctttttcctgccaaagaaagattaagcgagagagagagagacaaggtctcatcgagcaaagagtgtgtttccatggatgtgtacgaagcaactaggatcgtgctctctagaatccagaacttagacccagctaatgcttccaagatcataggtcttctcctccttcaggatcacggtgagaaggagatgataaggttagctttcgggcctcagaatctccttcattctgtcatagccaaggccaaaaaggacctcgaagagcggctttctttcttgactccgagaaccgccgaagattttgagtccgatttagggttcggatggggtcaccgcaaagaggtgcttaggtccaactctgttccgccgagacttgccaatcagttcaccggttatccattctccccaaaggtgtcaacttgcacagagtgaagcccaaaggttggagcttttcttattctttattattttccttcatctgtatggacgggtattctgaaacttctggttggtaaaatgtgtagcagagctgctgctttgatgatgggcgatgacttgcacaaattgggaatatggatgccagagag

SEQ ID NO: 26365 - DNA, 495 bp, Arabidopsis thaliana
tcccggacctgcccgaagactgtaagttttaacattcaccattctcattttcttaaccaagttgcataaaacagagaaagctctgtctctgactagtgttatctttttggctgagaaaatggtgcaggccatcctcggatcattcaccgcgacatcaagtctgcaaatattctcttggacttcaactttgatgctatggtgataaactagtagcttgcattcatctacggttttttgttaagactacattgatgacattttgcatttgtttattcaggtggctgattttggattagctaagttaacatctgataacaacactcatgtatctactcgtgtgatgggaactttcgggtaagcgttttaccgtatgataagattgttcgtgacactcaagaaacataacctttgtagactaatctactttgcttctttccacaaacatgtgtagatatctagctccagaatatgcttcaagcggtaaattacccgaga

SEQ ID NO: 26366 - DNA, 615 bp, Arabidopsis thaliana
tgcaacaccagaatacgaataacgatccacgataagcgtagttcctgtttttagcttttcctccatcaacgacctgcaaatgccaataacttatcaagtcttcttactaagcactagaggattaaaaagggaatcaattggataagaaccttttctcccaacgattggcgctgaaaaggagatgaattgtgtgatcatctaactgcgacttattagaaagatacgcggatatcatctgaccgacactcgtctctctatcggggaatctccagagctcggtcggatgtcctaaaccattcaagaaagagagtagcttagcacactgtgttgatttcccgctgcgatcaagaccttctagaactatcaatgctcctcttggcttcacactactctcggttctgacaccagaagaaaagttgctactctccatccgaactgatgaacgcttgatacactgcaggggatagttcaaggaacgtggcgatgctaaagctctgaaacttctggaaactaaaaagagagttattagataaaggattcaaacttaaaatctatctataggcaattgagagtaatatctgtttcaattcacaaaatccataaggttatgaagaa

SEQ ID NO: 26367 - DNA, 629 bp, Arabidopsis thaliana columbia
tgacatatgcatagcggtaacaattaagcatctatattattatttatttttaccgtttgctaaattttttaaatattcggtaaaaaggttataactgacctattttgtatggctttgatgatattttgtagattccaaacgtggtgggattcgtactagggctgttgcaaatggttttgtacttggtttacaggaactcaaatgagaaaccagagaagattaattcgtcagaacaacaacttaagagtattgtcgtgatgagtccgttaggtgtgtcggaagtgcacccagttgtgacggaatcggtggacccactctctgaagccgttcatcatgaggatctgtccaaagttactaaagtggaggagccgtcaattgaaaacggcaagtgctacgtggaggctactcgtcctgaaaccgtttgaagtgtcaatatgtgaagctcaaaatattgctctctctctctctctctttcactctctttctctcggctcgtcagggccggccaaaggaagaaattgtattatcggcggggtggtttgttaaattccatttttgttcgtatcttatgatgatgtctacttgcataaagttttgtgtttattgaatatattactttgtgtaagtgt

SEQ ID NO: 26368 - DNA, 977 bp, Arabidopsis thaliana
  unsure (1)..(977): unsure at all n locations
cttaaagatctgatatcatcgatctatctaccagaacatttaatcaagagagagcagagaaaatgagtcctaagtgtataaacagttatcaagtctttattcaaatttcactgagttcttgactaaacttgctacaagatggtaaaaagaggactcacagtttctggatcactgatcagttcgttccattcttcgggactcacatatgttccaactctttcaattggcgagacactaggaattccaagcgtaacaatctgcacagacattgcaaaagaaaacaactcttgacaatccacaaaactcctccagtctcaacttcaaagactaaaaagtgtacctctttcttaagtttgaccctaacatgatcccatctaaatggagcatcttcaccagctgcaagaggagagctactactatgtccatggtgaattgcttcttgctcaggactcacaggtgtctccacttgcctcaaaccatttaaccggacatctctctgtataaatgccaacacttcctccactgattcacgaatcccacagatactttccatttatcccttctggtgcaagaatgattccacctgaaacacgctggtgaaacaagacaatccaatctacattagtgattagtgcctcaaaatctaaaccaaattttcatgatcaatacaaacactcgtaagtaaagacttaacctttcgtagacagacactaaaaatctacacttttgaatgagatagaagaaacgccataccaatttttcgcagagatccttgagaggcttcctgaaatcagcatgctcaggaaaatcagcgaatttgtagaatgaaactacaacgagcgagcctaaatccgaatcaatagactctgttctctctgagaatgcctgagnaacagtagcgatgcttctccgtatagctccggcgtttngacaagccaccgtggattttcagagagaggaaggagaggaagagagtt

SEQ ID NO: 26369 - DNA, 708 bp, Arabidopsis thaliana
attacttaaataaagtatgtataccatccaacctaccatcgaagtcctatgtatgttggtgagtcgtaaaagcttttgtttttactagattaataacgaaagagatcattggtacatacatttgcaaaatccccactaaaaatattgcacacgtgattagttaattacatcaaatgaaattaacttttagactttttcaaattctttgacaagtctttgtacattttcaacggagcttccatttgcctccgtcacggcagcctcggtcttccgccgtatctcctcagcccgagcagccacctcgcgtcctccctcacccatcgtttccgctatgacccgacccaactcatccgagtcaggcacagtttcaccaccttcgcaaaccctaaccgcaacacccaaatgctccacaagcaacctcgcgttcacaaactggtccgcctccatgggccagcccaagatcacagccccactcgttatcccttcaagcactgagttccatccacaatggctcaaaaatccaccaaccgccacgtgtcgcaacaccgccagctgggagacccatcctcttaccaccaatccccttccggaaacccgatcctcaaacccgtcgggtatcggatctttcttaaccacccaaacaaaccgggtcatgcttttctctaagcctagagccaaagcatcacactggtctttagtcaacgcctt

SEQ ID NO: 26370 - DNA, 511 bp, Arabidopsis thaliana columbia
gtcgactcgactctagagcctgcctcggatccacgcaactattaaccctagttagattcaacactaaccacagttaacacgaaccctttcaatcttcctccacgtgtcaaaatcaacggtcacaaaaatcatttccttctctttataaaacactaccaaaaccctaatctctttcacacaatcacagaacctaatcttcttctccaatcaatctcagagaaaaaaagaaatggcaacaaaccctaaagtctacttcgacatgaccgtcggtggcaaatccgccggtcgtatcgtgatggagctttacgccgacacaacaccagaaaccgccgagaatttcagagcactctgtaccggagagagaggaatcggtaaacaaggtaagccattacactacaaaggatcaagctttcaccgagtgattccgaaattcatgtgtcaaggaggtgatttacagccgggaatggtaccggagtgaatctatctatggatcgaagttaaagacgagaac

SEQ ID NO: 26371 - DNA, 505 bp, Arabidopsis thaliana columbia
taacattccatgatgagtagcttccaatgttatctgcatccacacaaagcaatttacattctctctcaccttaaaccatacttcaattccaatcaaaagcaaaactcataagagagagtaaacagcaaaatacctcaaactcaggaactaaaccatgagcttcagccattttcttcaaaagacgaaaccatggaccaattctagtgcttggcaacgcgcccatccaggctttcctccttgcggcggtgattctccatcctttagatgaagcactcctacacttatcaaccaaaacatccttcaggaaaacataaaacaaccaaaacccaaatacaaagtttgaatctttcagaaaatcgtaaaaagaacaaagccctaatcaaaagtttggattttgatgcactaccaatcggatgaacagttaaagcaggacgatttgagacggcggtgtgacggctgaggaagatgacttcatcaacaacttcaccggtagcttcttccaacg

SEQ ID NO: 26372 - DNA, 628 bp, Arabidopsis thaliana
tttgagaattgagaccattttaatggaattttgatcagattctgttttctgttttctttggtagagacgagatgagggcacggagaagacggatgaagagactttaattggtgtttcgccacgaagggaatgtgatcttgatgaaaaagatgtgtttcttttaccgggagtttgaagaggaagctaaaaagttagatttgttggtttgtgatgactgtgaaacaccgaggtcagatataactgctcctttagcatttcctagcgaagaggaagctgatcatgagaatgagattaaccggttgagaaacacggtgagagcgctccgtgagagagagaggtgtcttgaggataagttgttagaatactacagccttaaggagcagcaaaagattgcaatggaactgagaagtagattgaagctaaaccagatggagactaaagttttcaattttaagatcaagaagttgcaagcagagaacgaaaaacttaaggctgaatgttttgagcattctaaagttttgttggagctggatatggctaagtctcaggttcaagtgcttaagaagaaactgaacatcaatactcaacaacacgtagcgcagatcttgtcgcttaaacaacgagtggc

SEQ ID NO: 26373 - DNA, 944 bp, Arabidopsis thaliana
ttaatacaaacttaatttcggtttatggttttagttattgttttgttccaaagaagagtgtctcatttcttttttgacattttctcccttcgaatctttgatgcatttggtcttatggatgcacacaagatgtaagttatatatcagatgccaaggtgatgaagtttgatgcatcaagatacaaacatcacatgctaatatttgcaataacagattgacattacaaagtttatatggcaaaaacattcaaaccaatttatataaccaaaactttaaatttgtaattatccttatccaaaaccaaatctctagactaagatagagaaaacctaacttaaagttaaaacctttttgttcattttgttctgagggggcttttgtgttgacggtggtgggaacaaaggaacatcgtatccattctgtccgggaaacacagcaatgttcatttccgacaaatctcgtcctactgatttctacaaagacgatcatcacaattcctccaccaccagcaccacacgcgatatgatgatcgatgtactcaccactaccaacgaatcagtagatctacaatctcaccaccaccacaatcaccacaatcatcatctccaccaatctcagccacaacaacagattctcctcggagaaagcagtggagaagatcacgaagttaaagcaccaaagaaacgagcggagacatgggttcaagacgaaactcgtagcttaatcatgttccgtagaggtatggatggtttattcaatacatccaaatctaataaacatctctgggaacagatttcgtctaagatgagagaaaaagggtttgatcgatctccgactatgtgtactgatatttggacgagtatgttaacggagaagcttatccaaattaatgtctcatgtgtcacttcattccgcaagatgtcgtattacaaagagattgaaga

SEQ ID NO: 26374 - DNA, 878 bp, Arabidopsis thaliana
tgtgaagttaactaaggtaccaaaatttagccagtaagcaaatgtgacaaaccggaataaacactctaaaatcttgatgtgcaacttaccaaatgacatgcacgagacttccattagatgtaccaagggtctttttgcaaagagttccggcaagaagttcccctctttcaattcgcacttgagtatcccccggagttataaatccagtctctgtatctgcgtgccaagcagagtacctcaacagatttatctgttttggtatgataagattaaaaacttgtttgccagtccaaagaggacgaggcttcaagattgcaggagccggaactttcccatcgaagtcttcccaccacatcagtgtgttcatgaatacatcctgaaaatggataagatatcagcataagagttggtttatcctctcatcaatatcatagataactttaaaaagcaaccgctgatgaaattgctaccttctctatgaaagtatctctctttgtaattttacggcacccccaaagggctaacccttcccaattcccaatcacaggacgattcgcctggggggagacaatacatttaggaaccatcatcagctctaacacctcggctctggtctcgaatgattgtggtacatgcgtgttcatctcatccccatcaaaatcagcattgtacggagacgtgacagacagattcagacggaaagtggaatatggcataatcctaatcctgtgacccatgatagacattttgtgcagacttggttgacgattaaacagaacaaaatcaccatcctgtaaatgccgctccacatgtgaccaagtaagcatgaaaatgacgacttccagaaataacgttttgtgcgttgagtggatagagta

SEQ ID NO: 26375 - DNA, 675 bp, Arabidopsis thaliana
ctctaatcaaccttacaccttcagatatgaagctgccattcaagatgcgaagaagacagttttcactgtcggttgcatttgctataacaatcaataagagccagggacaatcacttgagcaagttggtctttacttgcctaaacccgtcttctctcttggccaactgtatgttgcattgtctagggttacctcgaaaaagggtttgaaaatcctaatactagacaaagacggaaacattcaaaagcaaacaacaaacattgttttctacgaggtttttccagaacatagattgagtaacatttactcaatctatgtgacaacaaacttgggtaagttaacttcacattaactctttgtacattgaactttcaattatggtttgaatcacccccactcataaatttatatctctattgtgtttctaatataaaatgcaggttcttcacagccaactcaaattcaatccaaccacatcaaggaagtagcaatacattctctattctaaaacgaaactcttttttcacttaagtttaatcacaactctcagttttaagcaaacatgtcatactttcggtttagagcttcaacatttggttaaaacaacaatatgaattacttcagagaatgagcattgctattagattaccatcttaagaaaatcgtctactcagatt

SEQ ID NO: 26376 - DNA, 651 bp, Arabidopsis thaliana
tcaaacagtaataaaagtaattttcttaatcttacttgattcccctgaagaaattgatccgaacagcctataaatcaaagaaagggaaaatttgtattagtaaatacttttctgaagaaggaatatatatacagctaagttatatgtaaaacgtaccaatgagaaatagaggaaaatggcgataaagtaacaaactttggagccataatcgaaggagccagtgaccttagcccaagccatggaagcaacacttggagccgcaacgaagaggaagaagacaggatgaagatctttaggcaaagtctcgttggtcggtagcctttggtagagagtcacgaacagaaccaagtaatgagccatcccaacagcatagaagaatatagggccttctctaagccccatggacgcaccaagcaaggccccaacaaagttcccaacgaccgagagatggttggtcgggttggcgacccgggagagccgtcgttgaccacggacatcactgaccgtagatcttaagctcaagacagatgaatggaaacatgaggaggtacaaaggaaatgcggcaaatctgtaattatggaaggtgggacacgagggcaaggaagagtaaagaatgaaaggagcaaagaagaagttgattctgattggat

SEQ ID NO: 26377 - DNA, 774 bp, Arabidopsis thaliana
aatgttcattagacatgacaggatcaaatcttttcttcaacgtaccaatctgcttaagactcaacccaaaagctttcataagcaactcctcattgatccctgacccaaaaaccacggacggtatcttctgaataccagggttttggctattaagtccgccgacaatcgtggccgtaacatctccgacgttcatctgaaaatgtacaagcccttttgggtaaaccatcatttctccttcttccatcactttagcgtaaaccttattgttcgagtccacaaaaccagagtaaacccgtcctttaaccaagtgggctacttccgtcgcccgcggatggtaatgtggtgggttaatggatccgggtttgagatcagcccggacaaacgagatgcctaatgtattaaggccggggaagttttctgggcctactgggacggtggcgaaccccgtctccgtgaagtttccggcagtttttagaccggaaaagacaaaatcttcggtggttacttcggaggagtttttgcaagggagattggtggagaagtgatggtcatggtaaggagatgtcacaggttttggtatgcagaagtcttggatgggatcagggtcggaagctaatgtgaagcatacattaaaacaaagaagacaaagagcttttagaagaaacaaagtgtttgcttccattttacttgaggtccatgtgaagaagagttgtgttacatccggtttaaataagcatatgtatatctggtgggggtaaatgagagactggttaa

SEQ ID NO: 26378 - DNA, 663 bp, Arabidopsis thaliana
acatatccactaggacacgaggcatcgatcataccaataaatccttctagacgtatataatacaccacataattttcttgtcttaaaaagctaaaaattatacttacgcagcatcggctctggagtaaaaaccggcgttaatacaggaaccgccaccgagaactctagcacgggcgttgtaaacgccgtcagtggaaacaaacgcttgagacgcggaagaagctgaaatgtcagcaagtccgatgtgaaaattcctgaggaaagaaacgtttgcgtttgtaaacggaacgccacctctctctaaaacaagaacgctgaaattctgcgacaacgttgcggcgagaggacaccctgcggttccacctccgatgactatgtagtcgtaggacgaatcttgaccgttggatgaaaatgaagatgaggaagatgatgagaatgtgcttgctttatcgatgaatgtgtatctgtatggattaaacttcgacttcttctctttacctacaaaatcattgttttttttagttgtactattcaataaataaaacgattatgggtagttggtagaagtaattcaccattaatgtgtttatagcagaacatacccaaaatacacacaacagtttacgcgtttaaaaaagactggactgtgcactagtgtcctgg

SEQ ID NO: 26379 - DNA, 574 bp, Arabidopsis thaliana
ggatccccgattcgtgaccctagaaggaagttccgctaagaaaatgttacgggttgatcatggaagcagaggtgaatctgacaagattacagatagtcttcagcttgctaaaacctatcagagctctaaccagagtcaacaaggtggtggtggtgatcaacagagttcaccagttactcggcttgaccaaaacgcgcttctcaactgcttggctcactgttcgttatctgatttcgggtctatagcgtcgacgaatagaaccttccgctcgttgattaaggacagcgagttgtataggttgagacgggcaaagggtattgtggagcattggatttacttctcttgcaggctcttagaatgggaggcttatgatcctaatggagatcgctggttacgtgtaccgaaaatgacattcaacgagtgtttcatgtgttcggataaagagtctctggcggttggcaccgagcttcttgttttcggaaaagagatcatgtctcatgtgatttactgatatagcatcttaaccaatacatggacatcgggtatgcaaatgaatgtcgcgaggtgcttgttt

SEQ ID NO: 26380 - DNA, 472 bp, Arabidopsis thaliana
tagctttggactcaatttgcaaattatttaggcctgacgaatgatctgcagtcccgctgctactatcagcatattccagctcttcatcgctgtcttctgtagttggctgttgaagtaaagagacctttgaatatgcaggtacaacaaagtcccgcccaactacaacactgaaagacaaaacaacaccaggctgcagaacagctcctgctctgactttcacaccatcacagacaatagcgttccttatctcacacccatcttcaatcgtaacattgttccatatgtatgagccttgtatcaccacatttgatccaatacaacatccgttcccaataacagagttatagattttacctccattaccaattttggtgccatatccaatgacagtggaagcgccaacatctgcagtgtgtgattgaactgcatcagaagcccggtatacccccgtctcccgagctttacagggcga

SEQ ID NO: 26381 - DNA, 457 bp, Arabidopsis thaliana
cttcacctcttgctgcgcgtaattcgcagcataaagctcgtcttttacaactgctacaagcggtggagcctctgaagccgctgttgcagcagcaatctcttttgcttgatctcctccacctccactgcttctttcaggtaacatgttaggtatcaatggccatgtcttcttcttcagatcatagacttcaccgcacaatagcatcttcgagtttccctctccgatacctccaatgcaatagaaattcccatccatgaacacgctcgagcacattttcctcgctttgttcatgctcgggatgaccgtccattccccagtttcagagttataaagctctgcagaactcagtatcctcccacgcggatcacatcctccagctataaccgcgatctcgcctagactcgctgatccaaacaagcacctcggggacattcatttgcatacccgatgtccatgt

SEQ ID NO: 26382 - DNA, 543 bp, Arabidopsis thaliana
agatcaaacgcatcagagaataataataaacattgcagtttccgttagtagctaggagtggaaagatgaggaagatggtgagagatctcaaggactcttcttctatgattgagcttagagatttccctggtggaccttcgacgtttgaactcaccatgaaattttgctacggcattaatttcgatatcactgcctttaacgtggtctctctccgttgcgctgctggttatcttgagatgactgaggactacaaagaacagaacttgatctttcgagccgagaattacctcgaccagatcgtttttcgcagttttcatgaatctgtcctagtactttgctcctgcgagacgcaagagattgctgaaacatatgaaattcctgaccggtgcgtggaggccatcgccatgaatgcttgcagaaagcagttagtatcaggtttatcagaggagctcaaggggagagattgtctcgagatgtggactgaagaactctctgctctcgggattgattactacgtccaagttgtactgcgatggcgaggtt

SEQ ID NO: 26383 - DNA, 731 bp, Arabidopsis thaliana
taggcctgacaaatgatccgcagtcccgctgctactatcagcatattccagctcttcatcactgtcttctgtcgttggctgttgaagtagggaaacctttgagtatgcaggcacaacaaagtcccgtccaactacaacattgaaagacaaaacaacaccaggctgcagaacagctcctgctctgattttcaccccatcacacacaatagcgttccttatctcacacccatcttcaatagtaacattgttccatatgtatgagccttcaatcaccacatttgatccaatagagcatccattcccaataaccgagttcatgattttatccccatgaccaattttcgtaccgtatccaatgacagtagaagctccaacatcagcagatcgtgattgaactacatcagaagccttgtatatcccttgtctcccgagctttagaggccgatttccactgaaattaatatctggtacataaggatatgtccacctctgaattatatccttgctaacagtgtcatagcttcggaaattatcaatcctaccagcatagctcgagtgaatctcatgagtgaagattttataacccataatatcatccacaagcacacctttgacaaaatgacgacgcagatgttgataatcaaagttatcctcaaagagactaagcacttcaggagaacatatgtcaatgtagcaatcctgcatatcattgcatactaaaacagaaggat

SEQ ID NO: 26384 - DNA, 1492 bp, Arabidopsis thaliana
ggtgtttgttgttttttactctccttcttttttcttctatatgaccaaagtagtaagtactaagcatcatcttccttaaccctagaacttgaacctgacgtcataccaatcacttgtgtatgcgtaaatctttgcaactgtatcattcgcgcgtagattccatcaggatggttcttgagaagatgcgaatgcgatccttgttcagccacttttccatcatcgatgacagcgatcacgtgtgcgttcctgattgtagatagcctatgagccacgactattgatgttctaccagagcaagcctggtctaatgcttcttggactgatctctcggactctgcatcaagagcgcttgtagcctcgtcaagcagcatgatctctgctttcctcacgagggcacgtgcgatcgcgatcctctgtttctgtcctcccgagagctgaacgcctctctcgccaacatacgttttgtaaccttctggtagcgcggatatgaatttgtgcgcactggctagagtcgcggcttgtatgatctctgcttcggtcgcacattcatgtccatatgcaatgttttcgtaaatggtagttccgaacaagcacggctcttgagggactatggctatgtgtttccttatggctttcaggttgtatttccttatgtctttcccgtcgatcatgactcggcctgaggaaggttcgtagaatctctggatgagggagataactgagctttttccgcacccgcttggacccacaagagctagggttttgccagctctagcacgaaggctaaggtcacggaaaatctggatgtctggccttgaagggtaagagaaatcgatatgtttgagctcgacttcaccacgtaaccggtctgggaccggggtggtatcaggatcatcaggttcaatctcggttttccggtcaagaagttcgaaaacagaccgcatagcttgaccacctttgatgaaatcaggagccagtgtgagtgtctctgctgcaccattggctgagaccatcagaaccatgaagactcttatggttttggagaagtcagagatgccgtgtttcacaagccatgatgcgtaccatagcccgagagcataagatgcataaagacagaactgagctacaccataaccacttccagcgatctgtcctttccagaagcatcgtttcaatggtggttcgaggtttgcagtgtagagacggacaatctttgcctccgagttaaatgcagcaactgtcctgacattagctatggcttcaccagcaagctgcgttcccttggcatgtgccgcttccaggtctcccgagaaaccagtcatgaacattttctgttcaaaagacaagacaaagtttcagatccaagaacaacaatgagagcatgcacatgctttaaaagaacacaaacctgtaagacagttgcagcaacaactacggggaagactgcgacaaggacaagtgcgagtctccattgtagaacaaacccggcagt

SEQ ID NO: 26385 - DNA, 828 bp, Arabidopsis thaliana
  unsure (1)..(828): unsure at all n locations
tgtcgtcttcttatctttctaatatgataaaacggtacgtagttatttgaagtaaggtaacaattaaatagcctctgttattgtctttgttttttgtgtatatttaaatatcaaaatccaccggtataaaacggcgtaatgcctttgtattggacccaattctttcaattttcacctaatttaattacctccgtatttattttttagtgcacttcaatgtctcttgcatatatatattggagcaaattataaacataatgttcatagtgaaattgttagttggttttaatctctttttaagacaacatataatgtcaattgtatgtacgtttttcttgtttctcttaaacacttcttttgcgtttgcatttgcgattcctaaaccgccaatagtaaggagactatcaacgacagtgacatcaaattcaacagcgtcttcttgctcagccaatggaaatccaatcgatgagtgttggagatgcgacgaaaactggaaggacaaccgcaaaaacctcgcggattgcgcggttggattcggacgcgactcaattggcggtagagccggggagttctacacggtgactgattcaggagacgacaatcctctaaatccaactccaggtacattacggtacgctgcgacacaagatcaacctctatggatcatttttgatcgagacatggtaatacaactaaaacaagatcttcaagtagcttcatacaaaaccattgatggtagaggaaataacgtcaaatagcttatggacggtgtttaactttatataaagttagtacgattattataacaatntttatatcacgattgtg

SEQ ID NO: 26386 - DNA, 775 bp, Arabidopsis thaliana
taaccaatttaaacgtaaacctaaaaagaggagatagcatataattatgaatatacacactactaagtcagaaaacttgttccttcaactgattctcgctcacgaacgttccatggaaaccataaggtaccctctccggcaagcgcaccgccgcgacttgcttcatatccgtcgcgtcgaccaccacaaactccgactcgtctttctcttcgtctctcacaaaccccattacataacctttgtcttcttctccttctccctccggtacaaagcacggttctccaccgaaccggctcggtccgtaattaaactctgaaacggtgccgttttgtatatctaccttcgcaatgccactgcatttgggccaaggatcggctattgctatgtaaacgaactggcttttccggcccacgtaactacggtttatgtgacccgcttctaaattcactccggttacgataaccttacggttcgattcttttgtacgcatgtttaaccggatctcacttaattcaacccgggttggttctcctgattcactaaagatcgtgtcgggtgggctcatacatgacccgattacgacgataactgggtctccctcttcggttctctcttcccacgcattccatagatggaaacagaaacaatccggtacatcaacccaatttatatccgacccggtcagatcctgctttgacaaaactccaaatctcgccattttttctttaacgtagataacgggtgaccgccccgaatcatttcggataatttgaat

SEQ ID NO: 26387 - DNA, 1200 bp, Arabidopsis thaliana
taaaaatcaattaaagtatgccgtgcattgttgttgatttgacttttaattgcgtttgtttacacataaatctggttccattttcttaaaattctgaaatctttatcttgttctgttttcgctagaaaccacaatcaaaacattcatcatgtttgtttgatacaaaagatagaaaaaaaagatacattcaaaattatctaagacaacaaaggataacgagtaaaaaataaatagtattcatatgctaatactcaaaacacgaaagggaaagtaagaaaaaattgaaaacaaaagatagtcttgttttaagtaggcttcctcatatttcttcctgcacgaatcacttcatccactaatagcaactgcgaacgaatcaccggcctgcaatacaataccaaacaaccgttttaacaacctgaactcaaccgcaactgaattaaaagactccattatacaaatttccatttggttctgcacataccctgaattgataagttggcgtttcaccgagtaattgtcgaaaatgccggcaagctgagggtcgacgggttctccatcctgtaggtctagtcccacgatgtttcctttgtcatgctcactctgtatatacatcgaaactcagtagataaacacaaacataattttacttggagcataatcgatagtggcagaagaggaaaatacaagaataataccgttagagaaatgataacgtcttgagtgtcaagcccagcattttcagcaagcgtcttaggcactacgagaagggcattagcaaaagcttcaacaccgagttgagcgcgctgcaatttgcccacaatttacattagcaaccagaaaaaaacaagaattggtattggagcaaaggaatattgctttctactcaccccttgaacggttttcttgacttcattgattaagtgttgtcttgctgcaacttcaaaagctccagctccctacagaaagaaacagatgtcaataaaccacatgcgcccaaaaccaaaacaatcacactgatatagcaatggatttgatctttgtggagaagaaggtacttactaatacgacacactcatcttctagggtattcttaactgatcttaaaccatcacggacagcgtccttaatttgagcaatagtgtggtcattaggccctataaagaaaaccaaatcataatcatagataatcaatgaccacgg

SEQ ID NO: 26388 - DNA, 1062 bp, Arabidopsis thaliana
ttgtggactgaccttggctgtctctaaactttcccgcaactcctatgggtccaccaacagaaagtactcagaatctatcggtggcacatctcatatcccatgtttcattagactgggacagggagaaaatttcacaaatcttaccggagctggagaatgatatccttgagatcaagttgagtgcttttggggccaaggatcgttacgcctggttgccagcaaaggatggatcctacaacacaaaatccggttactatgaaagcctcaacaggatccgaatgctagaaaaaaatcccacacaagaagcaaaccttggttttgcatgaacaaaggatatttggaatattaaaacttccccgaaaaccaagttcttcctctggaagctgatgaaaggggctctccctttaggtgagcacctaagaactagacacataaatgacacagctttgtgtaccttatgtggaaacgaggaatcagtcctgcacttattcttcaagtgtccctttgccaagcaagtctgggacctggctcctttcaaaaattctttatccggcgatcgtattccatctctgagagcaggaatcgaagcctccaaactcttgatttgtcttcctccaacgggcttaaacgcagggcctctgctgccttggattgtttgggcgatctggatagccagaaaccaaaagatttttaacaacaaaagctattctcagatggacactctatctcatgcaattaccctggctagggaatcgcaaaaagcacagggccaattggatcccacaaagaagaagagcatccggaaaactcgaagaagtcaggaaacagaatctcacctctgtttcacagatgctctatggtctgaaagctccaaatctgcaggtttcggttggatcatcaaattccgtcgatctggttttcgcagcaaaggatcagcatcggattcccatatcagatccctggttgttgctgaggcaatcgccattcaactggcactgaagcagagccttcgactagggatcacgtatcttgctatcgtctcagatgccaaactgaatcatg

SEQ ID NO: 26389 - DNA, 912 bp, Arabidopsis thaliana
tctccgacatttttgggattcggtggcatctctcgcgaatccgatcggatccgtcgttgacaaagggcttatcgctttgacgagagctagggttctaatcaagtcagacgaagagatattgactgccgccgatgaagttcccaccattgatctcctccgtaagatcggtttctccgaaacgattcttgatcggttcttccgaccattcttcggcggaattttcttcgacagagacctcgagacgacctcgaagctcttcgatttcgttttccggtgtcttgctctcggagaaaacacacttccagccatgggaatcggagaaatctcgaaccagttggcagcgaagttacccgctaagtccgtcttgttgaacacaagggtcgcttctattgagtatccaaatggatcgggttcggatccacctagcgtgagctccaagacggcagcgttatgaaggcagagctaggtgtcataatcgccgtcgagcaaccggaagtgaataagcttctcgatgggatcagagacccggttataacaaaaccagctcggagcactatttgtctttacttcacagctgaaccgaaccaaataccggtacaagacccggttctatttctcaacgggtcaaattccggtataatcaacaacatgttcttcgctacaaacgttgctcggacatacgcgccaccgggaaaggctctggtttcggtatcattgatcggattgtttgaggatagaaccgatgatgatttagcagcagaagttcttagagaactctctggttggtttggtgagtctccggttatgtcatggaaacatttgaaaacataccggatccaattcgctcagcctaaccaatgtccacccactgatttggtcaagagtcctcgggtcgggtcgggtctttacttg

SEQ ID NO: 26390 - DNA, 582 bp, Arabidopsis thaliana
gtttcttccaagaccaccaaattcaatcatttcgttctaatgagtgcgtatggcccgaaacttgtctaatatgagcacaaagcaggtcatatatatgctttggttatattctcaggtctatcaaattacccattaattgattatttttttcttatgaaaataagcagagttgaggatttaaacagtattaattattttacttcgcaactaattaagaacaatacattacaaattccaagagctcgtacgtgatctagagatagaaaatagtgagctcaagaactaaacgaggtagacagatccactagtattggactaacgataacttctcatccattggatcctcccaaaactcacgcataggctcattaacaggatacaccatgagctcacgaacattcataggttggataacatttgggtcagctccaaagataagatgagcaaacgcttcttgtgctttctctgtgttatgacgtgcgtcgaagtaaaggtaggatctttgatattcgcataacttcgagtgcacgttaggtaaccacaaccatatgcataatgcgtcctacaccgcaacacgatata

SEQ ID NO: 26391 - DNA, 842 bp, Arabidopsis thaliana
tgaagatttatatatccatcattctgtgatcgaattagatttcctttcctacgtagatcaatggtttttgtagtatagtatagacaagttcgaacttgcttgcttttgcttaaccaatcattaactcgtattttagtttcaatctctcttatcaaaaacacggatgcttagcttagctcatggacagtctctacggccaacaagccgtaaatacttaaaagacccatctcatagagctcacgaatagacacaatccaagggtatttacgtaattaaacataatctgaaaaccttttcccatactttctctcctatgtgtcctcacctccttctctccttttctttgttcctttgtctcttccatttttccaagaaacaaaaggctctttttcttttcttatcaaatcttcaatcaaaaccacttcgagatcaatcgcttacaccaaattcccaaccgatgatttcttcaattaaaccggtttcgtcttcctttagcgcaatcacgggcataagacgatcaattctgccaaagcttcaattttcacccttttccattatcgaaaacttccaaaagcctaatcatttaacctcaaaagcctcttttatcatcttagaatttgtcgaatttcacttttgcggcggcacgagcgtagaggagtgatttcttagagtaggagcttatgagtctgattggcctcgtctgattgaaatcggtatcaacgttcctgacgaacaatcgggacagaaggttaagcttgggatctgttgcgcaacttggtgggcattgcacattgtgttcaatatctagaaaaagaaggttttgaatgcttgtccttacatgt

SEQ ID NO: 26392 - DNA, 599 bp, Arabidopsis thaliana
tcaaaattgtccaactctttctaaacatgaatttagtgtaaccatggaggatggtaatttgacagtccaggttttagatgaaatatttgaagattcaaatcctctatgggaagatttacttattggcatattcccacaaattgctctgcatgttacaaaggtccacgtaattgtgaacaagatctggtctctcatagataaaacagtgaagatagatgcttatttagttgatgctaaaacaatcaaattttgaatcaaagacagtttagtaagagctatggttcttcatcggggtatgtggaacaatgctgatatgcatatgattgtttctaaatggtcttcggtgatagaggaagctcagccagagattaaatcgatgcctatgtggataacgcttcgaaatgttctgcacaccatgtatacctggaaggggttaagctaactcgcaagcccagtgtgagaaccaaaaaagctgcaccaagatactgagctctgtaaaatttttgaagaagctaaagtatctgtagaagttgatctatcgaaggaactgccaaaaaaatatcgcttcaaatctgcaaatgctattgatgcaatgattg

SEQ ID NO: 26393 - DNA, 838 bp, Arabidopsis thaliana columbia
ggtcaagccaggtaaacgttttgtttccgttcttcccttcctactcttctatagctctacatcagctgttatgccaaagtcagtttcaggcaaaccagctgttgtctcaaataagctgaatctgttaaagcacgttagtctgattcactgccttaggattgtaaaccgctactagcttatcttgttttcaataaagggttttgaactcgagccagaaacaagctgttgtctcaaagaagctgaatctgttaaagcatgttagtctgattcactgccttaggattgtaaactgctagctactaacttatcttcttttcaataaatggtttttgaactcgagccagatcctacagttctaacctgaatctccgttgttattgtttgctctaactattatttttatttttcacgttcacagatactggaagtgtttcctacgctctcttcgcttccaatgcagcttcgtgatcatcttcaacagatgattcattggttggatgaagctattattggagatatgctgcctcaatatgaacgtcgtaatgacatgcgtcaggttttagatagagatagaagacagaggtgtttatttaaaagattctctgatgaagacagagctaggaatgaagctattgcctacctcttagatcatccagaagatggtcatcgatcacaatctgaacaaatttatggcttctccagagtacgacgagctgtatgggtgcgatgtagaattaaaaatcaaatgaagatgggagttttgattgagtttctagagtcaagtgttacagttcagtcattaggtactgtatatagtgaactacctgacgatgtagga

SEQ ID NO: 26394 - DNA, 817 bp, Arabidopsis thaliana
cccattgggaacatgtagcacatctttgcggaagcaaaggatatttgtaaacaatcattgcatcaataccatttgcagacttgaagcgatattgttttggcagttccttcgatagatcaacctctataaatactttagcttcttcaatttttacaaagctatgtatcttgatgcaactcctttggttctccactgggcttgcgagaaaacttaaccccttccaggtatacatggtgtgcagaacattttgaagtgatacccacataggcatcgatttaatctctggcggagcttcctctatcacttgagatcatttagaaacaatcataggcatatcagctatgttccacataccctgatgaagaatcctagctcctactgaaccgtctctgattctaaatttgattgttttggcatcaactaaataagcatctatcttcactattttatctccgagaagcaagatcttgttcataatgacgtggacctttgcaacatgtggagcggtttgttggaattttccaataagtagatcttcccatagaggatttgaatcttcaaatatttcatatggaacttggactgtcggattaccatcctccatggttacactgaaatcatgtttcgaaagagttggacgattttgaacaattgatacatacaatagtttttgcaacacttcaggtgaagcttcagagttagtctgaatgttttctgccaacgtctgcaacatgatcggggaaaactgcggccgatccgccgcatctacttgattgagacccatgatactgaaaccctagatcgccttcagaattgc

SEQ ID NO: 26395 - DNA, 485 bp, Arabidopsis thaliana
cgactctagtcagtgtgctttaaagttcaccaggatcgtaataccatagagacagactatttaatagaatcgatcgtttgatttataatgcagatgacatcgggaacatctgaagaatatatcaacttagccggtgaccaaattgtagccgacacaggattggccgctctaaatttggagctttcgttagggcagggagaaccatcatcatcgacatctctagagggggaagctttgtgtgttgattacatgataactgaagaacaagataaatgtatcctgttcctggtaactgaagcatcttatcattcttttttggtctgttttaggataacttgggatcgaccataattataaatttataatttgacaatgagaagacgatttcataggttttgacttttgacacaagccattttttctgcagatagagtaaggagatcatttttttctgcagaatgatatgtggagaccaaaatccgttt

SEQ ID NO: 26396 - DNA, 1097 bp, Arabidopsis thaliana columbia
cgactcaggtcttcttcatgattcagctttgattattgattttgggaaaattgcatttgtttacttgagctgttgtaatggaggttttcacatggacacataacttttttttgtatcattcctttgcagtcactgttgtttgctgcaggcttgcggcctacaccggcacaagcaactgttgttagctgggtatgttaaaccacttcagtttgtttgttcgtttgcttgttcagtccctgtccgtaagtgaaagttttgtttactctattggttctgtagatattgaaggatgggatgcaacatgtcggaaagctaatatgtagcaatttgggtgcaagaatggactctgagcctaaacggtggaggattctgggtatgcaccattctgtagctacatgtttctgctgatgtctttatagcgttaactataaaaagtattgattcataattttcagctgacgtgctttacgatcttggtactggtctggaactcgtttctccattatgcccgcatctgtttcttgaaatggctggtctggggaattttgctaaggtatagatatctttcttagaacatctgtgcctgctttcctcagcagcttcaataggagacctatgagatatattagctttctaaagaccatccttttatacatcaatcagcttcactggtttcctgtttttcatacttttctggcattgtttgttttaaatagggaatggctacagttgcagcaagggcaacaagattaccaatatattcatcttttgccaaagaaggaaatcttagtgacatttttgcaaaaggagaagctatctctactcttttcaatgttgccgggataggtgctggtattcaacttgcgtccacaatatgttcatcaatggagggaaaggtaatgtcattctgctacatcgttactctctatttcaaaatgcagtttctatttgtttggattgcaactctattatgaaaaggctgatatctgcagttggtggttgggtcaattctttcggttgtacatgtgtatagcgttgtagaacaaatgcgaggggtacaatcagcacactgaatcacagcgaacgctttgattgtg

SEQ ID NO: 26397 - DNA, 1493 bp, Arabidopsis thaliana
gttccctcgcaattatcaacggaatataacagatcgatgtttccttctcaattaggctcttagtataagttccactgtagacataaatgagtaaatataagatatagatagagaccatgtatgcatgcaaaacttaaaaaaaacaaacagaaatcaattatatattttaattagggtgggatcagattaaaacttctggaactttaggatatcctttcgatcttgtaaaatttttataagatttttatcttcctattttaagactatatattaaaaagtggaaaagattggattatatcaaccctaattcaccgtctaatttgttttcctctttatgccattacatcatctactacttgattaaggcattatatacattaaaatgatttatattatgttactagatcagaacccatttgatacatgggttaatcaataaatgtttttttataaagtttaataaggtttttttgcagttttatctaaatattaataggctatgaaaatataatatggtgaagattttaagattttatgaaaatataatagacttctggaatttgatgctttagttttattacaaaagcttgtctagaagacttgaagtattagacaatataattgaggaaaatgaaagacagtaaaacgcttttgttgatgaaatcgaaacaattaccaaatttccgaggctgaaaagagatatgtcaatgccttagattagaggtgagttactttttggtgtgttttcacatatttcttcaaagttattagctttgatatttaaatattctacatttacaaacaaataggtggtagaatcatacctaaaattttaaaaagttattaatatacaaataaggactatatattttaggagataaatagttttcttggaccttgtagctgtctaaaatctagcaaaataggtattaaaaaaagtaaaagatttcttttttgtttggtcaacttacttgtattgtggagagattttttacctttactatataggatttgagagaatatatatttaatgcaaatttactttcctactatacttgggcaaaacagaagaaaatttgagtggaccctcgttacgtaacgcatagaagaaacttggcttatatataacgcaagtggcgaagtccacaagaagaacacaaaaaacttaagaaactcttcacgagaaaaacttgaagaacttaagaatccaagtttacaaaatatgatcatgatacttttcttatgcttaataatattgttcatcataaccattctcttcttcaaaaaacataagacagtgaacaaaatcatcaactttccatccccaccgagacttccgttgatcggaaatcttcatcagcttagccaacatcctcaccgatcactctgctatctcagccaccgttacggtccactcatgctcctccacttcggaagtgtcccgttattgtagcctctcagcagaagcagctcgagacgtttaaagacgcatg

SEQ ID NO: 26398 - DNA, 949 bp, Arabidopsis thaliana
cctaaaacagaggaaaaccgaataataagatgcttcagttaccagaaccagaattcaagataggaatttcttcatcttgttgttcacttatcatggaatcaacacacaaagattccccctccagagatggataagaagaaactgatgatgcttctccctgccctaacgaaagctccatatttagagcggtcaagcttgtgtccgctacaatttggacacagggtaagttgatatattcttcagatgttcccgatgtcatctgcatcgtaaaccaaaggatcgattctgttaaatagtctgtcactaaggtattgatcctggaaaatataataaaacatcaagagatagctttgcaattttcagttctaattatgtcaaaaggcttacccgcatccgcttattgcttctcgcagtctctacaacatcacatttttctcgagactgttggctgtactctgtttcagagcttccatcactatcatctggaaatggagacacattcaagagtcgtataccacattcttttatcctcttggagcaagaaaagttaaactccacatcgttgaaagtcaatttagatggaagatcttcaggctggaagttgaaggaacagaaaaccagatgatccgtcttacacaaccgcaggtctgcatctttaaaaaatgatttgcaatacagtgtcccattgaagccagcatttacctcacaatatggaccccaactcttgccctcagttagaaggtcaaccacgatgcaagccttaaagcaagaatacttgagaaagagagctctaaggtaaagtgacagttagggaatctccataagctcgatgttgaaaatacgttggcacttctccacctggtaaggacataggcttgaacaatgaccgtaagatgagttctcgcgcatctccatccaatttgcagcagttctggaagagataatgaaa

SEQ ID NO: 26399 - DNA, 817 bp, Arabidopsis thaliana
gcgtgcgtagctaataaagagaaaaacaacctgtgctaatatacacattgagatctatgtttcaaagaaaaggcagacaaaatgttcaaagcaaacagagtgtttctgcattcagataaagaagaaattacaaacactttcaggctccggagttggatgattaaacggaatttggttctccaaatatcattctgcagaataaaatgatctccatgtaccatctatcaataaaaaatggcttgtgtcaaaacctatgaaatcgtcttgttatcattatagatatataatcatggtcgatcccaagttatcctaaaacagaccaaaacagaatgataagatgcttcagttaccagaaacaggatccaagaaaggaatgtcttcatcttgttctatagttatcatataatcaacagacaaagcttccccctctagagatgttgatgatgatgcttctccctcccctaacgaaagctccatatttagagcggccaatcctgtgtctgctacaatttggtcaccggctaagttgatatattcttcagatgttcccgatgtcatctgcattataaatcaaacgatcgattctattaaatagtctgtctctatggtatttcgatcctggaaaatcaaatcaaaagtcaaaatatagctttataattttcagctctaatcaaaagtcaaaagatacacgcatccgcttcttgcttctcgtagtctgttggttgtactctgtttcttgagagacatacatgagtcgtacaccgcattctttgatcctattggagcaacaaaacttaaactccacatcgttgaaagt

SEQ ID NO: 26400 - DNA, 691 bp, Arabidopsis thaliana
tctctgtcaacactcagctttatgccagagtctcccacctcctcaaagtcggcaagaacaatttccgccctcctccaaaggtggattcttccgttgtcaggatcgaaccaaggaggcctggccctcaggttaacaagaaggagtgggatgggttcttaagagtctgtttcatcagaaagaacaaaaccttgggatccattttcaagcaaaagtctgttctttccatgctggagaagaacttcaagactcttcaggccgtactagcttcgttgcagaacaatggagaacctgctttgaacaccacctccatggatcttggtgaccagagcatgggaatggaagatgacgacaacgaaatggatgacgatgatatggagatggatgagggagaaggagacggaggagaaacatcagagttcaaggagaaagttatgaatgtcttgaaggaaggtggtttcgaggagaagagatcttcaaagctatcacaacaagagtttttgtatcttctttccttgttcaacaagtctggtattcacttcacataatcgttttgtggtgtgaaagttttgtccttacttattactattgttcaagttttaacatttggaagtgaaaatcaatcaaagtctttgagttactgacgcaaccctttcttctgctcataactataatgaatcagttttttctgtga

SEQ ID NO: 26401 - DNA, 642 bp, Arabidopsis thaliana
  unsure (1)..(642): unsure at all n locations
gttggcttcaatggcaaacagtatcagaaatcattttctaaagatgcagaactggagctttgtaagacggatcatctgtttttctgttccttcaagttccggtctgaagatcttccatctaaattgaatttcaacgatgtggagtttaagttttgttgctccaataggatcaaagaatgcggtgtacgactcatgtatgtctctcaagaagagaacaaccaacagactacgagaagcgagaagcggatgcggggtatcttttgacttttgatttgattttccaggatcgaaataccatagggacagactatttaatagaatctatcgtttgatttataatgcagatgacatcggggacatctgaagaagatatcaacttaccctatggcctaattgtagcggacacaggattggccgctctaaatatggagctttcgttagggcagggagaaccatcatcatcaacatctctagagggggaagctttgtgtgttgattacatgataactgaagaacaagataaaggaattcctatcttgtntcctgtttctggtaactgaaacatcttatcattctgtnttgctctgttttaggatacttgggatcgctatgactataatgataatgataatgataattaat

SEQ ID NO: 26402 - DNA, 853 bp, Arabidopsis thaliana columbia
cacctaacgaatgtatactgaccagagacacccagatcttggcttagtttcttctttgcctctgtctgaatcctagcatttctaccaattattttcttgagagatccctctgtggtctctagatcgtcatcccacgcattttctccaacataagaactatcgtggacaagtgttccatcaggcgcttcaatgaacctttttaatttcaagcctttaggtgttgctttcctccacatatttctcttgaacctgaaacactagaataagtcaggacattctacaaaatcaaataaacagaagttcttttagtcttcccactcttgacgctttagatgcctcattagctgagtatttacttgttaaaggatgataccatagtttgaatatgaaccatattttaccatgtcccagtagagaaaattacaatcggaaactgaggattaggaagcacctacttttctatatttccaggagatggctcggggatcaaagcctccataaaagactctgttaactctcttctctctcgttctacccgaggagcttggatggcaacataaactctttgacaagaaagtaacagcgcaaaagcatatatgaacaaggcagcaactcgtttaccgtcccaattcctgatgtcctgatacaatacatcttccctcattaagaaacaacctaatacactagtatatgtcgctagaataagcgtagttgtagtctcctccaaaatttatgcttccgttaaatcaacaacaaaataaataaataccatacgtttgtccctcaatgttttagaacacaagcagaagtctaacaatacttgagaatcagaaatttgataattacgttaaaa

SEQ ID NO: 26403 - DNA, 479 bp, Arabidopsis thaliana columbia
caaattctcaatcaaagagtttatcattccggttcaccagactctgaatctcaccttcactccctccaagaatttgttagctttcgttaacggaatcgaaatcgtctccatgcctgaccggttttactcaaagggaggatttgacaacgttttaagaaacgttagtagcgacgttgacttccagatagacaactcgacggctttcgagtccgttcaccggttaaacgtcggcggacaaatagtcaacgaggtcgacgattcaggaatgttccggcggtggctttctgatgattcttttggaaactctggatccattgtgaatgttccgggtgtaaagatcaactacacggagaagactccggcgtatgttgcgccgtatgatgtgtatgctactagtcgcttaatggggactccagcaacttgatgttcaatctaacgggtatgttcccacagttgatgctgggtaaactacgttgtga

SEQ ID NO: 26404 - DNA, 1264 bp, Arabidopsis thaliana
gaactaagtattaaggaaaatgttactaaccagatagcttgttttgcagaaaatcagtaaccctttgtacaggaactgtaaaatcgccaccacccattatggctgctcttctttcaaattctctctagagataaacaaatcaaaggagaaatattgaatttaactcatgagtactaatagtaatccactttcagattgatacctgaaactcaattccagctaagggtcctttaagattgagaacatcaaaatcttttgctgagactgtaacgacgagtgcagcattggcccatttggatgaacggcgagaaaatgacatgccattgatgcagagttcggttgggtttgtgctggtgagaacaacctgaaaatacatggaaacaggcttattcgtgacaaatcaaaatggaaaaaaaaacagcaagacactctttaaggtaactgtacctgaccaccaggacacatgcagaaggagtagcaactgcgtttcgatgaagactgcgagagatcctcggtcttatcattcacatactgaacaaccttataatccgccactggtactttacctcgccctttaagaacttcattagccaaatccgagtactggaaagaaagaccatcacaagaacataggtgttttatatacaagtcaagacttgaataacgataaggtacaacaaagtctgatatattgaaggttatagtattaagataatcgaacaaacctgtatactgttaattagctcctgaggatgctcaatacgcaaaccaacctgatccacacaaatcgatagaaatcaaatgataataccaagccagggaagataaaagtatccaaatatattgattcaaaatggatattttataaaacaacacactcaagaaatatgtacaaggaacttacagcaaaatcttttggaatcaattcgacattacgagaatgaagcatctcatatgtgtcacgtgctgaatgaccaactgcaagaacaactgcatcaacctttaaattctgggaggtagtctgcaattggtttgttgaatccgaaaccctgactccaacaacacgagaatcctctaccagaagatcatctacccgagttccaaacttgatagtcacctaattaagtatatggaaatgaaatcaaagagaatgctcagaggagaaaaaaaaaaaaaaaagcattaaaaagtaatagagagacatagatcaatctctcattctaaactttactcccgcactttgaagataatgtctgaaattacg

SEQ ID NO: 26405 - DNA, 950 bp, Arabidopsis thaliana
agaagttagaatagtgttcaagatatagtctaataacatatagatgtagtagtgtaacagaaactcacaattctgccaaccaaggtgtagagggtgtaaatgtctgaaagaaaattgacagttgaggaacattgaaaaaagatatttagttcatacactaagaggatagacagacattacgtacgtaatattatttacctcatcagtattctcaaaggcaagtatgttatctgtatgaaacgtcttcagcttcaatagaatatctatgtcccttaccaaaaattctggacatcagcaacgctaggtacatacgccaaaagctgtggaactgactggaaaatgaacaactaaagggctactggaaaaccatgcatcacaagagaacgctgcttcagtttctttgtaatgtcagactgattgcgtacttttttcccaacttttaccatccttaatgtcctctcaaatgaatgtctacccgacatgtagctcaagaagaagtccaaattcttaacaatctcaaccatcgggactgatggatggatatgttatgtcccacatattataatacattccacaataacaattaaaacaagtcgcaacctacgccaccccaggatctgcctatcagatttcaaaagcttgagaatatgcttaatagtgaagttcttatgaggactgagcaacatttccaaatacatataaccacttcgcggagacgattggtttttacatttggatttctatcagggaaagtggcacagtagagacctataacttgtttcaactcgtctagcgaaaatcgcagcgcctggcctccaaatgtaaaccaaagctcatgtgagttagccgtgatgagttgtcgagacaagaaattgtgcagcaattaaccagataaagaacattggcgacatgggagggagaacaggaactgaattgggacgcataagagt

SEQ ID NO: 26406 - DNA, 581 bp, Arabidopsis thaliana
caaaccaaaaattatcgttttagaaaattaaataaccaacgccgaggtaagtaacaacgctaatttcagctaaaactaagagtctaataatataatgcttttgatttatttcttactcctccttttgcttcgtggaaagagtgcgaggtgagtagcggtagcactcgtacaccttcctacaaacttgagcacttcgtctataagaatcactggaagcgaaacagccagtaccagcagccactcgttcaagctcagtggcactatcccaaatacctgagccaggaatggcacgtacagtatcacaaagtggagcccgaatgagacagccatagccaggagtaaccacgggttcacccacggcggcatcgttaccaggctgccgtcttctgagagtgcgttcagggagttgaacatttcaatggccaccaacaccgagagggagagtgtggacgccttgattttccctgctggaaatagtcgcaagggtttgagtcgaacgagaaagtctgagagcatgctgtgaaaggagacactttgaagccttcccatgaagagcattggcccaatgtgcgagctgtgaa

SEQ ID NO: 26407 - DNA, 1277 bp, Arabidopsis thaliana
ttctgtaacagaaccgacgagagtgtctcacaatctcctagagactctgggatttctccggtgagattgttcgagtacacaatcacactttgaagtttacctccgtgacacaaattctccggtaactttccggttaactgattctccgaaacttcgaaccgctctagcttcgaaataaacccaatctctgccggtatttctccggttaacttgttggtaaagagtttcagctccttcagttccggtaattttccgatagcccgtgggatttctccggttaactcgttgacaaagagatacaaaagctctaaattcgttagatttccgattgattccggaatggaaccgtttaaattgttagcggagagatcaagatgtaccaagttcttcgccgaaattgatttcgggatttctccggttaagtcatttgcaaagagataaagctcggtgagattcttcagcccgaataaaacgtcagggatccgacccgttaaattgttgaccgataagtctacgtgtttaagatccgtcatgttctcgaaaacaacggctgagatttctccgatcagattcatctcctctaaccacatgtacttcaatttcttcagtttcccaaactccgttggaagcttcaccggcgtaaacttatcgtttaaagctaattgaagttcttcaagctccgataagtctccgatctccgatggaaacgtaccgtcgtattcgctcatgtagaggtttaataccttgagcttcgagatccgtccgatgttttttgggatatctccggcaaaggagttagccgcgagatcgagatacttaagtttaggtgcgagacggttgatgtcgtcgggaagtgagccgttgaataggttctgagagagatcgaggtattgaagcttcgtgcaattgtaaagaaccgttggaaactcaccggcgaagtaattaaacgacaaatttagggatttgagattcgggaagttgcaaatcgtcgttggaactgtcccggtgaagttctggttctggaagtttatctcggtgacgtttccggcggtgcaggtaatccttggccaattgcacggtgaagatgtgtcgttccatagccggagagacaatgggtcgccgagatcgcgtttcaggtttagcagcgttgaccggtcgttgtactgggaaaaggcgggaaagggtattgatgtgaggaagaagaagatgaaaagtaagggtaaaaaagtcattctgggattttggtttgtcagaggttttgccgggaaatttcggca

SEQ ID NO: 26408 - DNA, 568 bp, Arabidopsis thaliana
aataataatgccttttgaattattttcttactcctccttttgcttagctgagggagtgcgaggtgagtagcggtccactcgtgcaccttcctacaaacttgagcacttcgtctatcaaaattaccggcagcgacacagccagcactagcagccactcgttcaagctcagtggcacaataccaaacacctgagccaagaatgggacgtacaatatcacaaagtggagtccaaatgagacagccattgccaggagcagccacgggttaacccagggtggcatcgtcaccaggctgccatcttctgagagtgcattcagagagttgaacatttcaatggccaccaacaccgagagggagagtgtggatgccttgattttacctgctgaaaatagtcgcaagggtttgagtcgaacgagaaagtctgagagcctgctgtgaaaggagacactttgaagccttcccatgaagagcattggcccaatgtgcgagctgtgaatagctcacaaggctgtgaccgtcttggctcaggtctatgccataaagctgttgtgtgtgtccatatgatgaat

SEQ ID NO: 26409 - DNA, 557 bp, Arabidopsis thaliana columbia
cagttttccagtcactcccggttcaaattttctccggttatacttttacccgacccgatacggttcccaattcaacgccgtcaaatccttcttctccgtcaaagtcaacggcttcactctcttgaacaacttcagcgctgacttaacggtaaaagcatctaaaccgcaaacggagtttataatcaaagagtttattattccggtttaccaaacgttgaatctcactttcacgccgtctttagattccttagctttcgttaacggaatcgagattgtctccatacctaaccggttttactcaaagggaggatttgacgacgttataactaacgttggtagttccgttgactttcacatagaaaattcaacggcttttgagacagtttacaggttaaacgtagggggaaaaacggttggagattcgggaatgttccgacgatgggtctctgatgatgagatcatactcagtgaaagttcaggaatctctccgatcgtaccagatataaagattaactacacggagaaaactccgtcgtacgttgcgccggatgacgtgt

SEQ ID NO: 26410 - DNA, 537 bp, Arabidopsis thaliana
gtcatatatttctatttttggaatgaattactgataataggatccaacttttccttggaacttaccttagataagttaatgcttcgtaaagcaaaaacagccaaggccttgaacagcacaccaggaccttcttctagcgagaacacgatacttgtctgagagaaacagaagcattactattgggagttataacttacaagtatcagccgaattagttagtacataaagatgtgattaccttatatggtcgatctgttcttggaatcataggctctctcgcaagtatcagaaagcgagtcacattgttaacatcatcctgaaaaccgtcgaaagaacaaaatatcaacttaaagataacggatattgatatgtatcattacattccttctatgtcataaatcattccaccttacccaatgatgtgcattacaatatgttaatatatttccgtagagacaacattattagtaaagaagaggatggagactaattacttgtatgttctcagcaagaatatctagaccatagatatttgca

SEQ ID NO: 26411 - DNA, 579 bp, Arabidopsis thaliana
tgaagagtttgaagctaaagttctaaaatgagaaaatggtgaaagaagattcttgaagtataccaaagccacaaaccctgttcttctgtttgggtatattcacatgttcttcacggtatggtaacatgaaatcaattgaagagttgctcggttatctgactagatccattggataacacccgaggatacggatgaaacttgcgaattcctgcaaaaccagaaggtaagatctttagaattggtgagccttaagaccagctataaaagctctggggttacaagattgagacctgtagatggccaagagcgtgctgagcacgtgtatcagccatggaggcttcaaaatcaatgtagaataagtaatcaaagtacctgtcatcatcacaaaacaatcactcaactactttgtcaaaaaagatgtctgcatgttgtgtgttagaaatctacttacttagcgcttccattgttagaccatcaactactcttaacggtcttcttctctgcggacgactttctatctaaagaagagcaaaagttacgtcatatatttctatttttggaatgaattactgataatag

SEQ ID NO: 26412 - DNA, 548 bp, Arabidopsis thaliana
ctcaatcgtacaacatcagttttgaccacaaagctcagaagcttccaccacgaagacgaagaaccaagtgaagagtcgattccttctggatgttgtaatcagccaaaaaagccaatgcttctgccttttggaagtgtctgcctatatctgtcctccccatttaatcagtctctgtccttaccttcgacggtaacccctttatagtacagcagtcccgtttccggcagtgccttccccccccctagtctagaccgagtatcaatagttgtagttcctgtccgttatggacccttcgtatctttcaaatccaatcaatgtgtggtgtgtatccaagggcaaatgcaatctctgaatctgttacagccattgtagcactaggtgcctacccataagcagtagttgcccttgaatgtgcatcaaatcctaagacaagcctatctaatctcacttcttagtctaaagcactcaaatccttagagatgtaattgagaaagaagcgctctagctctcacttgaagtacaggaaggataatgactcgagcttttcc

SEQ ID NO: 26413 - DNA, 719 bp, Arabidopsis thaliana
tccaaagttgggaaaattggcaatcttgtgccttggctcctgtggcgtctgtgaaatcacggaatgagctgatgtttaaaggaaaggagtatgatgccccggaagttctgagacgagcgatggaagactttgaggaatggagtactagacgggagcttgaagggaaagcctctggtcctcaagtggagagaaatctttcggtgcaatggaaagctcctccttatcaatgggtgaagtgtaacacagacgctacatggcagttggaaaatcctaggtgtggtattggatggatcctccgtaacgagagtggaggagtcttgtggatgggagcaagagctctgccaaggacgaagaatgtgttggaagcagagctggaagctttgcggtgggcagttctcacgatgagcagatttaactataaaagaataatttttgaatctgatgctcaagctctagttaatctgctgaattctgatgacttttggccaacccttcaaccggctttggaagacattcagcagctgctccatcattttgaagaggtcaagttcgagttcactccaagaggcggtaacaaagtggcggatagaatagcacgggaatctatttcgttctcgaattatgatcccaaattgttttctattgtgccacagtggcttagaagcactttgatttaatttggttattgtaacacgttggttaatgagtatttgaagttg

SEQ ID NO: 26414 - DNA, 532 bp, Arabidopsis thaliana
ttcaactacggggcgagagaagctcctttcagttgtcagagcttttcaagctttccttgtttgactgagctaaagctcatcaacttaagcatccgagaaatcccacaagacattgattgtttgttgtccttaaggaaaatggacctcaccggtaatgatttcgttcatctacccaaaaccatggcacaactgaccaagctggaatgtcttactcttcgaaactgccgtcagctcaaagcattgccactacttactcccaccctcactcttcctggtctagacaaccaaccgaggggtttgatagagctttgcattgacaactgcaagaatcttcagtcactgcaagatcagctattatgctataacaccagtttagcatatttagaccttagcaaccatgatttcgagagaataccaacaagcattagacacctgtcctcactgaacactctctggctcaagaactgcaagaaactcaaatatgtggaagagcttccctgagtctcaacatctctatgcacacggctgtgat

SEQ ID NO: 26415 - DNA, 759 bp, Arabidopsis thaliana
ctaaagtaaatggacttgcgccacgtaacggccaaagttactggcgatagagttattcgcgaccaggaaggagaattcgttgaagccacctttatcaaatttctgcgttaaagatgtgccaaacatccaggtatctttccagtcataatacgcgttattatcctgattatctttttccgatgcgctttcgtttgccgtgacataacgaccacttaccattaaggtggctttatcccataacgggatatctttatagcgtaaatcaatggtattggtattaatctgctgtttgttttgcaggctgcgatcgtaatcatcgacatcttcgcgaaccagcgcgatatcaattttacccggaccgactttccagttttccagacctacacccgctgcggcatcagtacgctgcgttttccagtcaagcatctggatttcaattttcggcgcaccgtgtttacccacccagaaatcagcctctggcgccaagggcaggaaacctttggtggtaacgtacatatcggagaactgcatatagttctcgccaccggcgttatcgccaaaccagccggtagagtactgctgaccaacgttaccatccatcatcacaacggcatcaacccgtttgccgtgttcgttgtagacacgttgtgttaactgcaaatcaaatcagccggagtattcgttaccaaagcggcccagagaaccaatcgcccatgatttaggtgaaccatgagaggcggtccccaaccagaacggtaa

SEQ ID NO: 26416 - DNA, 525 bp, Arabidopsis thaliana
ccttcatcgtgtggtgcggtttattttccgactattgttgatgatttctctcgatcagtatggacgtatctcatgctagcaaaatctgaagttcgcactgttctcacaaactttttttgcatatacggaaaagcagtttggcaaaaatgtgaaggtggttcgtagtgataatggaacagaattcatgtgtctctcatcttattttcgtcaacatggaattgttcatcaaacttcgtgtgtcgggactccacaacaaaaaggtcgtgttgaaagaaagcatagacatattcttaatgttgctcgggccttgttgtttcaagcaagtctcccaattaaattttggggtgaagcagtcttaacagctgcttatttgattaatcgcactcccacttctcttcacaataaccgttcaccttatgaagttatttatggggccaaaccatgttatgatcaattacgagtgtttgtatctgcttgctacacacaccgtgttgcacgagataaagacaaatttggagaacgtag

SEQ ID NO: 26417 - DNA, 626 bp, Arabidopsis thaliana
atgagactcgttatgtgtagtttttatttaagcaaacctgggtgctgtcttggactccacagttggtgattctgaaggagtggacggcccagtccaagtagaaagcatgctcggatttcctgagtggtagtccttctctaagtgcagcctcatcaatctgaatgacaccgattccacctttctcaagatcctcgacttcgtccttgatggccaaagcgatctggtaacaggtttcgtgcctacaatgattccaagattgtcttagtgttttgttctttatttggtgtttatgtttgtttttagattatagtaacattatgtacctgggctggtcgttcctgacaaaggaccagttgagaatggtgacgggaccagtaagcatacccttcattgggcgagaggtcatgctctgagccattgcggaccagaagacggtcattgccttgggacggctcacatcaccatagataactggtggcttcacacagcgagatccataagattggacccatccgtttgcagtgaaggcaaaaccagacaactgctcaccaaagtactcaaccatgtcgtttctctacaaaattgtgaaaacatgtctcatcagaaacagtaccaaggattactag

SEQ ID NO: 26418 - DNA, 551 bp, Arabidopsis thaliana columbia
tctctctgtcatccctaattagaaaagaaaagaagggaacatatttttgagtctttgttgagatatttacatcaaaacactctctcaacaaccatggcttcgcttccggtgaagcctctaccttccggccacttacagcttcatagccggaatcttattattccgccatcaatggtaaccgttggtttcaaaaggcatcacttcttaggagtctcttcttatggtttatgtattgatgaatctgtaaggcatatgagaagcctaaggtcgtcgagcaatcgtcggcgagtaagtaaaagcgccggcgtgtctatgccggtggcttcctctgatgattttccagcggtttcttgggagtcttggaagccggaaaagaccacggtggctccgtcgctgagtgacgtcatctggcctgcagcaggtaaattagtagttaaactgaatcactaatctttgcaccggagatattattatatgctcattttgttacaaatagtcttagactttgatataaaaaaaaattcttgattggattttaagaatgattatga

SEQ ID NO: 26419 - DNA, 938 bp, Arabidopsis thaliana
gaggatgccctagatttcccttgcaataactgcgacggatttgcgataagctctctctttctaaacaaaagatattcagctaaatacatatctctcctcttatcttctttcacgtagttctctttggaagtctcatcccaaacccacgcttcaatttctcaatcctgcaccatcaacaaacaaaccaactggatcacacataaatttcttgtgaagaaagtaacaaaagttgtgatgtaaaaaggtttacgttggggctagtttcccgaggcaatcgagctcttcaccggtgtcttcatctatgactcgacccgttatgtcaacaatgtaggatctatctctgtccggaggaagtcctctacccgcaagcaagtccaaatctttccggtgaagctctcttccgttcacaaacactcccgttgtccacctgagcagttctctggcattgggtaattaagctcttctatgaatggctgcaacaaaaaggattccgcctttttagtaagattcaggaacatattgacaagaagcaatatcaaaaatgtgtttaccggtaatattccaagacctggacctcccattactccccagaatccagctctgtaatcatacctagaatgtccccaaaacacattagcagtcatgaagaagatgtcataacagaagaggcatcgaaagttacttaccagtagtttcctggctgaatgactccggcttgcttctctgcttttctcagcagacgttcggttaaaggatgtccatttatcgaaacattgcttttgttcccttcatcattctgaatagattttgtcagatctttgaagcttttcttcacaatgctcgcgaatccgctcttcttagctctttgctgctgatctttagatactccactgttacgatgagagtagtcgttgaagttaacttccatctcacttgca

SEQ ID NO: 26420 - DNA, 1272 bp, Arabidopsis thaliana
tttacgtttcttactgaaaatgtaataccttctaaatgcccctcaaaagccaatctgataaaccttatctttctttgttcgttccagtgcgacacagctagttctaaaggcccataaggaggctgtcgaatctctaagtggaagtggttctgcaacacttggtaccgttgcaaccgttgttgccgctgccaattcaacagcattggaatgttccagagaaattcaagcagcaatgcagatctctttgaggaatgcattgaaaataacgccaaataaaccgattgatggaccactagatgatttgacaataatgaaggtgtggtatctttgcatctctctttctcttcgaatttgggaaacttttgtgaatagcatattgacatcctttggctgttgagattctgaaatgtcaagatgaacgatgaaagcatatagggacaccttacaggaaactctgcttgtcaaggatgaaaattaacagaattagcataaatcttattcgtccatcttcattctaatgtccaggttaaccttattgagccacttacatcttacaggaaactctgcgtgtcaaagatgaagaattacataatttagccagggaacttcgttctcgtgactcaatgataaaggaaatagcagataagctatctgagactgctgaagcagctgtagctgcagcatctgctgctcatacaatggatgaacaaaggaaaatcgtttgtgtggaatttgagcgcttgactacagactcacagagacagcaagaagccacaaaattaaaggtaatgaggccatgtcatatatagatacttttgcatccttgtgtatgttttgttgtttatttgatctttatctcctatgtagctcaaggaattggaagagaagacctttactttgagtaaggaaaaagatcaattggttaaggaaagagacgctgctctccaagaggcacatatgtggcggtctgagcttgggaaagccagagagcgtgttgtcatacttgaaggagctgttgtgagggccgaagagaaagtgagggttgcagaagcaagcggtgaagcaaaatcaaaagaggcttctcagagagaagcaactgcttggacagagaagcaagagcttttagcatatgtgaatatgttacaaactcagcttcaaaggtgagcctatctgaatctatctcccagggaaactcatgacttttgaagggtcataaatctctttatttttgaataaacaggcagcaactagagacaaagcaagtgtgtgagg

SEQ ID NO: 26421 - DNA, 581 bp, Arabidopsis thaliana
ctgccatgttggaatttcgtcgaacccatgtgaagcgacaatcctcaaatcttgttttccaagccacaacctctcttagccaattaaagaccgcaaagtttggattcctgtcattgacacaaagcgaagaatgagaaatctcctgagaatacacaatgagggaggtggcggaaaatacttgggactaccagaacagtttgataagaagaaatctgagatgtttcggtatattgttgagaaagtcaaagaaaaaactcaaggttggagcaagaaatatctgtcacaagctggaaaagaggtactactcaaagcagtgctttagctatgccaatctactccatgaatgtgtacaagcgaacaaaagagatttgcaatgagattagtggagtactagcaaaattctggtgcggttcagacgctgaaaatcacggtatgcactggtttgcttgggatcgtcttgctttgccaaaacaggagggtggtcttggttttagggatcttgaaagttttaatttagcattacttggcaagcaaacgtggcgaatgcttcaatatccagagagtctaatggcaaaacttct

SEQ ID NO: 26422 - DNA, 442 bp, Arabidopsis thaliana
ctccagggaacttctctgcaatctcgacccaagcctcgtaggacgctctcacgaatagacctggaggcaaaaccttcgtcggcacggagcagacgtagccaggaattggatgttctacgttgccggagcttaaatctagctcagaagtggctatgcgatgtctctcagggagatacttcatcatacttaaaaacccagcgttacacgttaggaagatgtaagaaggaaggttaagctcgtttgcgacttcgatcattggaacacccgaaaaatcgataaccataccgactacacgaaccgaaccggattctttacgtgaagaaactagagtggagagagcgtctctgactaaaggaactgttttcttggtggactcacgaatataagcctcgggagctttaaagaagagttccaatggtggagggatttgaacatcaggcaa

SEQ ID NO: 26423 - DNA, 546 bp, Arabidopsis thaliana
  unsure (1)..(546): unsure at all n locations
cactcactttcctaaaggtaaaccgaacaaaaatcgagaaactgaacatatctctatcgatatttgtccctaacctaatcgaaatcgggaaaacgttttataggtccatgatgctggacacatggttccgatggatcagccaaaggcagcattgcaaatgcttcagaactggatgcaaggaaagctcagtacacccactggtcggaccgctcatcagtaaatccaaattccgaaccggctgaattattatgtatttaggagatcaatattttacttttaagaaaagctaaataacatatacttgtgaattatttctatcaatacacaggaaacttcattgttaatttctaaccatcatataaccaagtcactacatgagttagattcgaactctatcatctaaaacctgataaatacttgattcattgaacactcttatcagcattatatgtcacagagatttgactattccaatttccaangtacacatagcgaatctatcactagagaagatacacataaaaacaaagattgtgaatcaccgat

SEQ ID NO: 26424 - DNA, 1203 bp, Arabidopsis thaliana
ccggagaaccacactctaacgtcatcgatcacaggtccacacaaggagctcatatcatcagtcctcgtattgtaataaacactgtagaacgcaactctggttcgatcagccttagccgtgaaattcaaaccggccttttcgaaactggagttcgcttgcgccatgtaatgaaagttctgcgcctgatcacctgcgaatgccataatagccaatggttccttgcatttatcacctgcgtggcctagtgagaaagacaatatgtacggcttatctgctttggtctcaaccatttgtgaaataattccttctttgcctgagagtagctcgacggctcgtttgccctttggaacagagaagtgatccgagtcaacaaaccgaaccgctctgttcgattcaacagtccaaccaggaagagacgagatttcttcgtcgaggtttgtcggaagtaaaacaccaagagacgtgttcctaaacatccatggaccatcttcgaaatctccattaatcaccgcattatctacaaaatgtaaccaaaaaaatcagggtgaaataggcacattttagaactttggagtcgaaaatagaaatatagagaaatttatggttacctttgggtttatcaggagtaaagagcttcttaatagcaatgtcatcgatgattggtccacaagtcggatcatcttccatacccggattcttaaaaaccaaccgtacatgatcatcttccgcttcaaacgcccacgcataagggtcccacccttgaacgctataaagcgtttgcaaatcaacgttccgcgacgccagcatatcgtccgcgtctgcgttcacagacgctaccgacacgtttatcgattcgagttgagcgcacgtgcgagcagcgctgaacgtgactgaatagacaaaacctttctcaaccgttagatcttggctgatctctgcgtcgttccctaatcggacggcgtgacggccttgtgggacaatgaggatcattccgccttgtttttgaccggaatttattagctccaccgtaccgttggatttccagcttgggatatcggatggtccgtcagttactccgtcgtcaggaaagccacttgacggtgatgtttcgaagtcgccgttgatcactaaacctgtcataacaaaaaataaaggttacagacaattttaaaataataatgtacattggattatttggttaga

SEQ ID NO: 26425 - DNA, 1851 bp, Arabidopsis thaliana
gtcgactctaccttacaaatacaaaaccctaattgtctcctttcttttgataaactaaaatgaattaaaatcaattgtaactaaaatgtatcttccctaaagaaaagggcacttgtaactgtagagtgtagacacaagaccacaaaatgtaatatgtcacgagttaatgcttgggaccgagagaataaatggttcaattctcgtgtttcgccttcactacttttgctatttttaaaaaaattggttttatcgtatttttttctccttttgtgtacaaataatttaattaccgtagtggctgataaatgtgagctcacgagaaacgcgagaattgaatgaatgtattttgggatgatattgtttgtctagattacaaaatcttgaaagaatgaatggcccaaaaatggacgtaaaagatgaaagatctattgttgttattaagagaccaactaattgttatacgtctccatcctagtatttttattttctgacaccattttcttaaatcccgtaattattccctttttctcaataaattacaactaactttcttgttctgccggaatcttttttcaaggcttggtggttaacggcgactttgagacaccgccgtcaaacggcttccctgatgacgcaatcatcgaggacacctccgagatcccgagctggcgatccgatggtacggtggagctaatcaagtccggtcaaaaacaaggcgggatgatcttgatcgtgcctgagggccgtcacgctgttagattaggaaacgatgcagagatcagccaagaacttacggtggagaaaggctctatctactccgtcacgttcagtgcagcccgcacatgtgcacaactcgagtcgctgaatgtttcggtagcttcttctgatgaacctatcgcatcgcaaaccattgacttgcaaacggtgtacagcgttcaaggatgggatccatatgcatgggcgtttgaagcggttgtggatcgcgtccggttggtttttaagaaccctggcatggaggatgatcctacttgtggacctatcattgacgacattgccgttaagaagctctttactcctgataaacccaaaggtaacgttatatttaggttttcgataccaaagttttataaatcatccaatagaagagatttagagtaaagttaaaagtaaaattttgtactttttacaggcaatgcagtgattaatggagattttgaagaaggtccatggatgtttaggaacactaccttaggtgttctgcttccaacaaacctcgatgaagaaatatcgtctcttcctggatggaccgtcgaatcgaaccgagcagtacggtttattgactcagaccatttctcggtccccgaggggaagcgagctttggaacttttatcgggcaaagaaggcataatttctcaaatggttgagacaaaggcgaacattccgtacaagatgtctttctctttgggacacgcaggggacaagtgtaaggaacctttggctgtaatggcttttgctggagatcaagcacagaactttcattatatggcgcaagcaaactcgagtttcgaaagatcggagttgaacttcactgcgaaagctgaacgtacgaggatcgccttctacagcatttattacaatacgaggacggacgatatgacttcattgtgtggacctgtgattgatgacgttaaggtttggttctccgggtctagtagaattggatttagttttccgctttttattcttctttctttggttttcatctagattgttccggttcagaaattgtattggtagaccgggaattaagacgggattccacgttgtatgatgtatcgttgtatgatggat

SEQ ID NO: 26426 - DNA, 606 bp, Arabidopsis thaliana
  unsure (1)..(606): unsure at all n locations
actctagagccctgaatcgccccatctatcctccatattccacagagatgacagctttgctctgggatacaacaaccgtaaccacaaaatcttgaggttgaacgaggaaaacgaaagtcatattgatgtctacgattttagctctgattcatggaggacggttcctgatgataatccctatagggatgaactcatttatcaaagtggcgtgtctttgaagggaaatgcttactttttcgatcgagaggtaacgacagaggcagaagtggggacagaagacttgttgataacaggcattgaagattatttacgctgttttgatttcacaaccgagagatttggaccgcgtttgcctcttccgtttatccttccctctcctagttttgaatatttggctctatcttgggctagagatgataagctcgctgtgttatatagccactacgacacatttgacatcatagagatttggatttcgactaagattgagcccaatgcggtttcgtggagcacttttttgaaagtggatatgtcctaatcaatggttaacggatgattttttgattagatttgaaccanaagcttttttatcgacgaggagaagaa

SEQ ID NO: 26427 - DNA, 467 bp, Arabidopsis thaliana
agaacgaccttagcgttatcttcgttatcttccgtgatgcatagcaataaaccgtcgcagtgaaagacttgagatacatcgacttcatcgcccaagctaataagctcaccttcaggcttaatacacgactcaatgtcattgtgaacgttgactcgaatcaaataaaccctaaaatccatcatcaggaccatcataaactctttttccttcgctgctactattgcttgataaccaaggtgattctttgcaaagctctcacctttagataaagtattccaatctttacaagtaagtcggacgtttctcagagatgttaacgaaaccctagagagcacctcttccgccaaatcattagggagattagacatcttcgtcattgtttaagtctcaacgatgatcgttcgtacgtagtaagtctctacgatgatcgatgtacttcaaaaacgatttctatatgcctctgtgat

SEQ ID NO: 26428 - DNA, 548 bp, Arabidopsis thaliana
ggtatatcacagtcaggattgacatcaagaaccctccatgaatcagagctaaaatcgtatacatcaatgtgagttcttcgactgctttcgttgctctcttcatcatagagaaacctcaagattttgtggttacggttgttgtcgtatccaagagcaaacctgtcatatctgtggaatgtgtttcttggtcgaatccatttcgtttgccccaaatacggattccacacaaagacattcgagttctctttggcgatgcataacaataagccatcgcaatgatagacttgagatatctcgacttgatcatcattactaggtatacttattagcttcatagatggatcaacgaagtcttctttgtcttcgttacggattccttgaagatctaatctcaaagaacaaactctagaatctagaatcatgaactctagaaattgattccttgctgctgtttttctaccaaagatctgatttttcgataaagcattccactttttacaagtagatcgcactgagattagagatgtaaatggaaccctagaaagaat

SEQ ID NO: 26429 - DNA, 983 bp, Arabidopsis thaliana
ccctaagttctgtcatctgctttaaaaacctctatttcaaaagtgtgggatctaaaataatagcaatgagatgcgaagtagtgttacctgtctgtacgtgaatgtagaaggcgggtcatgatacggatctaccaccgcaactctgtcaccgtacttctccacagatgatctccaaatatcaggaacagacttccattcattagagctcaaagcagcctcccttggcaatgataagcgttctaagaatggcgaacaccgccttaactccttctcctgaatctataagaacggtacacaattgatgttacatataattcaggaaatgaaccataaggtaaacttacaagaaccctataaaagcctttcaggatcaagctgtttaaaccctggtcatcagaagcaattcagctttcataagacaagtatcctaaactaataagactcagaagtcagagccactcgttgtctattttggtgcaacagctaaacttgaaccttccccaaagtcaattcatttctttagattacttacttcaaaaatcaaagtgaaaggagcaattttttaagtccacaaaccaaaaaggaactcgccttggattcgcagcgaactcgaaatcccctgcgtgaagttctgcagccaaaagccttgtaaccaaacaccaatctcatcccagaaacttgaaattcaggagctgaggagcagtgagaaacgagaatcgaagctccgagagacgttgaagccatggctgaggagataagaggttatcgtgatgaagttgcttgcatagagagaatatatgagaggagaaagagagaaagatgaagaagcaaagaaaggtagaaagaaagagacgagaaagtaggtcgatgtcatgattacgatttttcacaggaaagatcagttccaagttggttggcacgctacagaagcatggcttcttcagactctcagagataataaaacaaaaaacagagctcaatac

SEQ ID NO: 26430 - DNA, 1127 bp, Arabidopsis thaliana
tgcaatcatccagttcttcaatcccaaagccactcctggtagtaagacgaggttttcttctttggctagcttcatacagaaatccatgtcgtcttctatgtcctccaacaatggaagcttcagcttcgtctgcagtttaattgttgttaagaaataagaatcatccaaattgatctagaatcatgaaagagtataagagacgttggtggtggtaccaataagtaagtgcatgactcaggtttcttgttgcagaccaagcaaggaatctccttgagcctatcacagaccaattccacgttttgtttcagcatcgaattcttcttggcaaacaactctttattcgctttccctaaaatctcaggaagtgcagcttgaacaatagttgtagcatctggagttatgtcaaggttctgttgaatggactgtaccatctgttacaagaaaaaggaaaaaacagagtgattacttgtaacacaagcgacaaaaacacaagttagtatgatgatcagtaaaaaggaagacagacccctgtggacttgagaattcctctggggtcattcaaagcgatccagccaattctccaaccaggaacaatccatcctttcgatataccgcccaaagtgataaccggagttatcgaagaaaactcccccattgggacaaaaggtttgtctccgaagattgtttggcaataaacttcgtctgtgattaccattattcccagcttcttagccgtctccgccacctataaaggtttcattcatcagcaccaatatttcgagtctctcacgagtcaaagctaattaaaagtatgaatacggaccttcttaagatgatcgtaagagtaaacatttccacaggggttgttagggtttatgataaccattgcaactgtgttctcatctgccatggcttcgatgcctgggagatcaatctcccattctttctctggaaggagatcgaacttgcggacctcgagtccactgtagacggcacgagcctcgtagtgagggtaactaggccttgggagaaggatgttagcgtttggtcgagccagtgactgaagaactacttctatcccttggttgcatccgacagttatgaatacatcattaggctttaccttg

SEQ ID NO: 26431 - DNA, 803 bp, Arabidopsis thaliana
cacctccccgtgttgtaagcaaatgtctaacttcgttggtataatgttagtaaatccatttaagaatacgagagaaatgcaaaagaggtaacacatagtcaaagctcctctgttttagctgtcctctgtctcgttctcatctctcacatgaaccataactttctctaacatcactctcctttacacaaccccaaaaatagacctcacctctctcgtcttctctattctctccgctccttaatttccaattccaaccttctctgttttgccttgatggaaaagatagctccggagctcttcctcgtcgccggtaacccggactctttcgtcgtcgacgacctcctcgacttctctaacgacgacggcgaagttgacgacggcttaaacactcttcccgattcttcaacactctccaccggcactctcaccgacagttccaactcctcctcgcttttcaccgacggcactggcttctccgacctatatattccggtaattttccgttattattttctcaaatccacgccaatatttatgaaatagtaacacttttttcttcttcttcttcttcttatttaatcagaatgacgatatagcagaattagaatggttatcaaattttgtggaagaatcattcgcaggagaagaccaagacaagcttcacttattttccggtttaaaaaaccctcaaaccaccgggtcgaccctgacccacttaattaaacccgaacccgaacttgatcatcaattcatcgacatcgatgaatccacgtcgccgttcctgccaaggccagaagcaagag

SEQ ID NO: 26432 - DNA, 612 bp, Arabidopsis thaliana
tccaacaccaagttgaccaacaggaccatacattcccgaaagaacatatgcaacagcctcaccaatagcaatcagaatcccaagaagcttctgagcaccattcctacaacacaaacaacacatgagacaacgattctcgacttgatcaagaaaattaccaaaagggaaacacttacaagagagcacgatcctcacgaacattgttgtcaacctcaataatctttgaccctgctaagagttgcatcactaatccagatgtgacaataggagtaataccaagctccatcaccgttccacgattcgatgcgagaatgacacgcatccaatagaacggatcagcaccggtggtagaatggatcccatagagaggaagctgactacaaacaaggaaaatgaagagggagatgacagtgtagatcactttctctctaaatggaatcttcctgtcagcactttgcacttctggaagaaaagccaagaatggcctcaccaaatgcaaaactctaaatcctcctcccattatcgaatctgttactgcaaaatttagagcctattgagaaattcttgaaacaaaatgcgaatctatacatactagctacatgtatcttgata

SEQ ID NO: 26433 - DNA, 528 bp, Arabidopsis thaliana
tactatgtggttgcagtttctctgacatggcagctcacccgttccatgcactgttctacatcgtcttcatgctcactgcttgtgctcttttctcaaagacatggattgaagtctctggatcttctgctagggatgtagctaagcagctaaaggtaataaaatcataacagcttgatgtatataacctgaatgttaacatggtgttggatctctgactctgaaaattaaatgtcacaggaacaacaaatggtgatgccaggacacagagaatcaaacttacagaaggaactgaacagatacatcccaacagcagcagcttttggaggagtttgtatcggtgcacttaccgttttggctgatttcatgggagccatcgggtcgggaaccggaattctgttggcggtcacgatcatataccagtatttcgagacctttgagaaggaaaaagccagtgaactcggcttcttcgggttctaagttagcttaaagaaggtgtaactttgcctgaggaaaaaagcagacagaaga

SEQ ID NO: 26434 - DNA, 1134 bp, Arabidopsis thaliana
gaataatgaaagacactgctgcattaccttgctggagctgtgatgaggtaagccagaccactaactggaatagattgtccactgtactcagattctttccattgtcccaaaaggtttacaaagaaatttccgctgaacttccggtagagaagctgttgaccacgaggaaaattcaatgtcaacaatatgttattgtggagatacgtcccatacagtgaagtggaaagaatggctgtacctgagaaatgaagtaaagatttgagacgagggcggattggaggatgatgggcatgttagaggtgtagaacagcttgattgggtaagaaccctgttgtccacgggcattctttgatctcacaggcaaaaccacacggaaaccttggaagtagatcacaatcaggaagatcaagactgtggcaagcaagttggtaacatttggaaggttttgccggtagaaagcttggcggagagccgcaaccttgttggacttggttatcagcatatggaacagtgcaataacagcaccttcaaactcagctccacgcccggtgttgatggtagttgggctaaatgccttccagataatgctttcactgcagaacatcaatataaactcttatgagttcaatataccgaaaaggattttggattttttaaagtgaggaagaagttgacctaccaaatgttggtggcaatgaaaagggagattcctgatccgagaccatatcccttctgaaggagttcatcaaggcagataacaatgattccagcaaagaaaagctgaaggatgatcagaatggcatttccaacaccaagctgtccaacgggaccatacattccagaaagaacatatgcaacagcctcaccaatggcaatcagaatacctagaagcttctgagcaccattcctacagaataagtacagacacagaataagaactcacacgaccacaaccttagggttttccaaaaacagctcaatcaattcaaaccagacattgaaacagttcaaccaaacacgtattgtaatgccaatacttcataatgggaaacgaaaacacttacaagagggcacgatcctcacgaacattgttgtcaacctcaataatcttggaaccagccaagagttgcatca

SEQ ID NO: 26435 - DNA, 957 bp, Arabidopsis thaliana
acactcctccaaatgcagccgctgttgggtgtaccggttcagctccttttgtaagttggctctctgtgtcccggcatcaccatttgttgttcctaatcatattttacaaataaattcactttccatgtcgaaatgtttaaattatttagcaatggagaaaaggtttagggattattacctttagctgcttagctacatctctagcagaagacccggagacttcaatccatgtttttgagaatagggcacaagcagtgagcatgaagacgatatagaacagagcatggaatggatgagctgccatatcggcaaaactgtaaccgtggaaaacaaatattcagagaactggaaatcaagtattgttatattgatggggacacacgttacttgtgaattaccttgccggagctgtgatcaaatatgcaagaccactaactggtatagattgtccactgtactctgattctttccactgtcccaataggttcacaaagaaatttccactgaatttcctgtagagaagctgttgaagaggaaatgcaaattgtcaactttatgttctcagctgtgttgtcccttaatgaggaaacaaaagaaagcacaagtacctgagagatgaagtagaggtttgagacgagagcagactggagaatgattggcatgttggaggtgtagaacagcttgatcgggtatgaaccctgttggccacgagcactctttgacctcacgggcaacacaacacggaagccttggaagtatataacaatcaagaagatcaacactgttgcaagcaagttggtaacatttggaaggttctgccggtaaaaagcttgtctgagcgcacgaaccttattggacttagttatcagcatatggaacaacgcaatcacagcgccttcaaactcagctccacgaccagtgttgattgtcgtggggctagatgctatccagataatg

SEQ ID NO: 26436 - DNA, 785 bp, Arabidopsis thaliana
tggtggtgatgacgaacaaattcttcgaattaatcggcggctccgtcgtattcttcagtatccgtcgctgttaaaggatccgtcggtgacgccgtaggaggaactgctagtcgtcgtgctcttcgttggacaatcgaaaatttccttcctaaaatcgatagattagttcttgttcatgtcatggctacagttactactagtccatctccttgtaagtctcgattcgaatttttttgttaaatcaatttcgagattcatgaaaatttaacactagtttttgtttgatttaaaagctggatcgaagattccaatagaggaattggatgagagtgttgtgtctatgtataaacgagatttgagaaaagaatttgaacaagtttttgttccgtttaagaggatctgcaaatccaacaaagtgagtttctgtgaaagctaaatttatgatactgattttggaagttttggagaaggcttatggaataattttactggttaaatgtttaggttgagactttgttgttggaacatcatgatcctgcaaaggctcttttgaagtatatgtcagatactgatgttgagtgtttagtgattggctcttgctcttctaatttcctcacaaggtaatgttacataatgggatttgatatctagtatgtgtttgtatatggtatgatcttgcttagacgtttggattggttttgacaggaaaaaaggacaagaaatgccattaacggtgctaggagaagcccagagacatgtgagatatatgttgtttgtaaagatag

SEQ ID NO: 26437 - DNA, 1395 bp, Arabidopsis thaliana columbia
cttttcatcaatttcttagaaacttctgattgtggtttaagtactgaacttagcgattgaatgtgttgacctacattggaatgttatcaggttgggggcacgacggataacatcgaagagagctgtgctacatttgcctcacgtgcattggatttaccagaaccactgaaaacaacgcatcagattgataactgtacagaaggctggtactgtcctgtaaaagctttttcatgctttgaagtttgttaagttaacatcttttaagtgaccaggttaaattgctttctttctctacagtgtcgtctttgctagaacaaaagagtactgctcggtcttccacacaaaaataagagtgagtttgctttacaatgctgtttgactggaaacaggaacaagctgtgctgattagttaattttttcaatacgttttgttctttattcttattttcaagaataaagaagtgaagaaactatatcgtgctcttgctgcggcacctcttcccattggaattatctcacattatatgcgcccaaaaaatatggctccaagactcgtagccgaagtaaactctacagaaatgtcaagaatcatcatcagaacatattttgaatattcgatgctatggatcttcttagtgatgtgaatatttcttgaaatgcagattcaattcaaggctggcacttgtgtcaacttgaggttttagaatgtaagaagattccttggcccgatgcagctactgagaagaaacacgatattgaagactgtggatggacttcaaaagagtttgcttatgagtgtacaataaaccttttaacaggcaagactcaccaggtatgttcatcgacccatatcctaatagacatgataatcatatgaatatgttgggatcatccagttgctatgttgaatggcttttcagatccgggcccagcttgcagcttgtggggcaccgttggttggtgactctatgtacatgccagcagcgattgcagaaatggggaatcctgataccaacccgtatgggaaagcaaagaaacattacacaatggaggagaaccaaaaggaaaccgctgttgccgaatggattgatagacatggcaaggaaccgagggtaggaatcggtcttcaagcttgtcaaatctcatgggacgatgatgatggcgagcacttctatgaagctgggactccatggtggagatgaaacacatgttctgatgtcgaggatcttatctaaacttgccgcagtaaatgagaggtaaagaactttttgttatacacaaggaatatgtcttgtttattggaactgatttctacaaaacagcttactattacattactctcctacttaatggaagaatcaaataagaaagaaatttgtgtcttccttttgtttc

SEQ ID NO: 26438 - DNA, 600 bp, Arabidopsis thaliana columbia
aagacatacactaaggtttatgagtatcaattactcttttttatcaagaattcttctcactgtgtttttaattctcttgcaggtttccaaactgcatctggatactaggggatgcgctacttggatgatagattgaaccctttcacatgttgggatgcaagcaaatatggattttgggactcctcatgtatcccataccacaaacatgttccttaacatgctacattctttcttctactaacttgctctgtttctgagttgtattcgttaccaatgatcacttcaggttgcttgatattatttgaatcaagcttccataatgtttgtaaaagaaccagtttttcccactatatggtggaagtgtgtaagtacttaaagatgatcttttgatgttataaaaaacacagcaccacccgacaaggagaaactgtttacataagaaaacagaaatagaattgaatccagaatccagaacttagaagtatcaatcatatatctttaagcatcacagaacaaaacgaccccaaagaagcaaaagttagattttctgagaattcttcttttgttctttgggaaaatgcaacttgataagagaaggaa

SEQ ID NO: 26439 - DNA, 700 bp, Arabidopsis thaliana columbia
cccaccgaaatcgtgtaatagaaggtcaaacgcatctatatctgtgtttaagctaaaagtaaacctcattgaagaagtaacataggaaagctttcgtagccgtcagatcaaccagacaaaacgtcatatcgagacaaaaactttcgacggagcagattctacagatacaatacacacggtttcactggatttcgcccctctctctttaaacaaaattaaataatatcagaagacacgttcttcttcttacgaaaccgactttgtagtttcttctttttttccattacacaaaaacgaaaaaacgacaacacaaaaacaaataacaaaatcttttaaataaaaaataaatcgactctcgtgtttgtttaacttcttgtttatttttcttagaggttaattaatttcttctctacatgaacgatccaatgggagaaacaggattttctagagaatcggcgccggagatcgtgttctcggagacggatatggctgcggctgagcagcttatgcatctaagcgaagaagaaacggttagctgtagcagcagcaccggcggagattgcggtggcggaggcggagacaagataaagcatgaatatgttagctcgagaatcggaaacgagctaaacgacggcgtacgaggaaactctattcttggcgtggagaagaagaggaagaggacggtgatgaaggaaaagaa

SEQ ID NO: 26440 - DNA, 680 bp, Arabidopsis thaliana
taaaagttgagattttagtaatagaataaaaatagtaatgaagtaatatttacaccaactttacgtgtaagccatccccacacacacatcaacctcctatataaacctaaacacatacctcaaacaaccaaaagcaaaaacctcatcgacataaaaagaaaaatggcgtttgcgatatcaaagcgaaacgcaaccttgtttcttgtaacgctactactaatctccgttccattgtcttcctccacgctacaacaagatttcgtgaagtgccttgtcgacaactccgacgtctccttccccataacggcgtcgtttttctcaccggaccaaaacgctactttgtttaaagaggagcttgaatcaacggcacagaatctccgttacttgacgccgtcaaacccgaagcccgtgttcatattcgagcctttgtacgagacgcatgtccaagcagcggtcgtgtgtgccaagaagcttcagcttcacctccggctacgtagcggtggtcacgactacgaagggctctcgtttgttgccgaggacgaaacgccgtttgtgatcgttgatttgtcgaagcttagacaggttgacgttgatttggacagtaacagtgcgtgggctcatgctggtgctaccatcggagaggtttatacaggtacgcttacgatgattatatatatagg

SEQ ID NO: 26441 - DNA, 599 bp, Arabidopsis thaliana
gacctttttgtgccacaagtaggcttagatcagcgaactgtatcagcactatggaagtcgaaatcccatagctccaaggcctcctgatgatagccactgccttggtttcttgtaattgtagaactgcgccgcgcacagtagatgtgagaggagcatacgcaattccgttactattctcttcccctcacaattgtgtttctttttaggtacacatctcaaaaaagcaacaaatcttatgtaccttaacattcagatcagtatgacgagagtatgatagtcgaagcttacagtagccaccgtcataaatgcagtgtccttccagtgcttctttggccattgctgctgttggtatatctacagagacgaaatagaaagcacgaaactgaagatgattgtacagtaacaaataaatgttcagaatttataaaacggttgaatcgggtcacaatcaaacattagtgcagatcagcagtcggatgtaccagagtattgaattaatgcttgcgttgaaccattcttctcaaatatagcaatcttctggacagttccatatgcagaaacacctatgagaacaaaggatgtatttttgagagctaaga

SEQ ID NO: 26442 - DNA, 594 bp, Arabidopsis thaliana
ctggttgtaagattgtagcagcagctcgtcgtgttgatcgtctcaactctctctgttctgaaatcaacagctttggtgcaatcggagtccaagccgcagctcttgagctagacgtttcatcagacgcagacactattcgaaaagcggttaaagaagcttgggaaatctttggaacgatcgatgttttgattaacaatgctggaatcagaggcaatgtcaagtctagtttggatttatcaaaagaagaatgggacaaagtctttagaaccaacttgaccggatcttggttaatatccaaatacgtctgccttttgatgcgtgacgctaagcgtgggggctcggtgattaacgtctcgtcgatctctgggcttcatcgcggtttgttgcgcggtggactagcgtatgcttgttccaaaggtggtgttgacaccatgacgaggatgatggctattgagttagctgtttataagatcagagtgaactcgatcgcacctgggattttcaggtcagagatcacacaaggtcttttccagaaagagtggctcgagaaggtaacggaaaagattgtaccattaaagatgcaacagactgtgg

SEQ ID NO: 26443 - DNA, 532 bp, Arabidopsis thaliana
cgcagctgcagatagtatagggtgtaagaacaagttaccgagcaatgcaggatcaatgagcagtgcccaagaaacacggactagctgtggtctagcatctctgaccctcataccgatatcgatcaactgatgctcaatatcttcccctctttgacaatgtgggattctagccatttcaccaagaagagacaaataccaatcaaagtcaactatgatctcatatgcattcctggagcatgccgataagacagaaaaaataatctcattgcagaacaaagggtctgacttgagtgcataattcataagaatcctggagatttccgacacattatcttcattcaccattgccattaagagatgcaatgcctcgagtttaacatttggatcctcatcgctcatagccttgacgactacctctttgttctccaaaactgcccacaaatgcttaggagcaacaatcgacaaggcgttaagaccgagatacttaagatttggatcatcttccaccagaaactcccggatctttgcaaca

SEQ ID NO: 26444 - DNA, 770 bp, Arabidopsis thaliana
caggagattttcatggtatatctgttgaagacctccgtaatttgatgtcttatagatgctcggtaactgatcagaatatactcacgagagaagtcacgggagaagaaattcaaaaggtcttattcgctatgccatataataagtccccagatccggatggttacacaagtgagttcttcaaagcaacttggtcattaactggtccagatttcatagctgctatacaatctttctttgtcaaaggcttcctcccaaaaggactcaatgcaaccattttagcactcattccgaagaaagacgaagccattgagatgaaagattatcgccctatatcttgctgcaatgtgttatataaggtgatctctaagattcttgctaacagattaaaactcttgctgcctagttttattctgcaaaatcagtctgcttttgttaaagaaagactcttgatggaaaatgttctcctagcaacagaattggtaaaagactaccataaggaatcagttactccaaggtgcgctatgaaaatagacatttccaaagcctttgactctgttcaatggcaatttctgctcaatactcttgaagcgttgaattttccagaaacgtttagacattggatcaagctctgtatttccacagcaactttctcggttcaagttaacggcgagttggctgggttttttggtagttccgaggcttgaggcagggctgtgcactctcacctatcttttcgttatttgcatgaatgtggctcacatatgattgat

SEQ ID NO: 26445 - DNA, 555 bp, Arabidopsis thaliana
ctgtttcttaaagtgtccctctttaccacatatccagcatactcgcttaccatctcgagacttagatcttgatctccctttacccttatttctttggttattgttggaagatccttcttgtcttcctctagcaaaatttccttctgatacagatcgattactctgtgacaactctctttctttgtctcgagctgcaaccatcacatcatctaacctcaacttttctcggctattactatacttcatggtttcaactaaaccatcatatcttgaaggcaacgaacttagcaacagaattgcttgaacctcatcagtcacctcaatctgcaaatgattcaaatcagccacaatctttaagaaatcatcaatattctcatcgattttcttgttttcttgcatcttaaaagtatagaaacttagctgagtaaagactctatgaggtagagatcgaatcatgaacaatcgatctagagttcccaagcttctgctgcagtttgacatagctcgatctttcttaagaccttatctgcaacattaaggaagatcacattcttc

SEQ ID NO: 26446 - DNA, 634 bp, Arabidopsis thaliana
caatgcgggatttagaggcaatgtcaagtcgagtttggatttgtcagaagacgagtgggacaaagtcttcaagaccaacttaaccggaacctggttagtctccaaatacgtatgcattttaatgcgcgatgctaaacgtggtggtggctcggtgataaacatttcatcagtatcctggctccaccgcggtcaggtgcctggtggagtcgcatacgcttgttctaaaggcggtgttgacaccatgacaaggatgatggcacttgagttaggtgtttacaagatcagagtgaattcgatcgcaccagggcttttaaagtcagagatcacacaaggtcttatgcaaaaagagtggctcaagaccgttatcgagaggacagtcccattaaaggtacaacagacagtggatctggggcttacttctctcctacgctacctcgttcacgactcgtctaaatatatctccgggaatacatacattgtcgatgctggagcttcattggtcggtctcccattttttcactctctaaccttgaactttaactttatgtgttatgcaaatttcaataatatgattacattaccattcttacatatatttaagcagaatttcattacatgcttgtattgaagattg

SEQ ID NO: 26447 - DNA, 1522 bp, Arabidopsis thaliana columbia
  unsure (1)..(1522): unsure at all n locations
gttggatcctcagaaattcccgtttttggaactcaacgttgtcaagaaagtcatgagaaacgttatgcttctagggtggccattgcaagaaagaaatgggcagctaaagaggatatagtactcattagtgcctggttaaacactagcaaagaccccgtggtcggaaatgagcaaaaagctccagctttttggaagaggattgcttcttatgttgcagcaagtccagaccttgatggtgttccaaagagagcgtcggctcaatgtaagcaaagatgggcgaagatgaatgagctagtcatgaagtttgtgggctgttatgccacaaccacaaaccaaaaagcaagtgggcaaaccgagaatgatgtcatgctctttgcaaatgagctctttaaaaatgatatgaaaaagaagttcagtctagatcatgcatggaggctgctgcgacatgaccaaaagtggttaatatctaatgctcctaaagggaaaggaattgcgaaaagaaggaaggttcgagttggtactcaagctgcaagttcacagcctattgatcttgaagatgatgatgtaatgcgtcggcctccgggtgtgaaggctgcgaaagccaaagctatgaagacaccaacagttaaaggagaagaagtgaattcagttgaacccttgacttctttgtgggatcttaaggaaaaagattgggatcgtaaggataagcaaagcaaaaaccaaatgcttgaaagtcttctttcaagaaccgaacctctttcagagtgtgacttggttcttaagaagaagctaattgaggagttgttttcataagtaccgaacctctttcaaatgtttaatttctttctaagtacttctaggatttgtttcaatgtcacaacaatgacatgtttaatttgctttgtctgtttttattgcaaatcactttgcttatgtatgatattgtcttaatgttatgtatgatattgctttaatgctttttatgatattgttttgtctcttatcttatgtcacaagtcatatttggccttatatgtcacaagactttgttgttaacttttgcagtttatcatcacgggttggagacaaagatagacaagacacgtaacttgcaactcatgttccacttgatgccaaaagagacatatgatttgtttgctgtgttgtcttgtttttagctttgagtctatcaacaatttaaatatgagttacttttagactaaatatatttaattaaggtatttttattccaataaaaaatattaggtattaaacaacaaaaaataatagatgattttttcaggatttttttgccaaattattttttagtctatcatataaaaatattatgctttagncgacatatattatatataaataatagaatatttattatattatttagtaatcacaaatgatttaaaaatgctaagactgcaaaactactattttttacggtaaaaatgtcatttaatcccccaactttcaaaaaattggccattttatacatcagacttcgtat

SEQ ID NO: 26448 - DNA, 437 bp, Arabidopsis thaliana columbia
ccactcttttcacatttggtccctttaatattgcttcttcttcttcttcttccatttgtcttttataacgaaaaatcatctctccgtagagcacaaaaagagcaataacgtaaaagtgtgaagaaacgaagtaatcaaagagaagagaacaattatggggcaatgctcatcggcgacaaagatgaggagaaagaggaaaagggaagaagaatgttgcagagaatcaatggagaggaggaataaaggatgtttagccatggtgaaggagagacgttctaggttttatatagctagaagatgtattcttatgttgctttgttggcacaaatacgccaattcttgatgaggtttgtgttagtattcgataattaaacaagtatatacgattgattatttttgtctctggtcacaacttggggttttgtttttagttaagt

SEQ ID NO: 26449 - DNA, 815 bp, Arabidopsis thaliana
tccctcaatgattctccggagatttacaagatgttcaaaaaaaaccctatacaaccacgggtagttctctagcagatagggcctgtagatgtagatttccatagtcttcgagctgcttattctttttttggagacgaagcatcagaagtaggtcatggtcattgcttcgttctccaaagtatatcgattttgtctattgaatctgaatattttaggaggttggtaaatcattttggaggctgtttatttgcctttcctttatatgtgtctgtgctggtttgttcttgcaaaaacatggatgatgtatgtaaagcttaagaaaatagttgagaatgtgtaaatgtattcatttatcattgcacaagcacaagcacaagatacagggttcaactttcagagagatgaaaagataggcacaccgggcaatgtagcaccggaatcaacaatgtatgtattcccggatatatattgagaagagtcatgaatgagatagcgaaccagagaagtaagccctggatcaacggtctgttgcacctttaacggcacagtcctctcggtaacattcttgagccactccttttgcataagaccttgtgtgatctctgacttgaaaagccccggtgcgatcgagttcactctgatcttatgaacacctaactcaagtgccatcatccttgacatggtgtcaacaccgcctttggaacaagcataagcaagtccaccgggcaacataccccggatcccggcgatcgatgagatgtttatcaccgagccacctcgtttagcgtcacgcattaacatacaaacatgtttgg

SEQ ID NO: 26450 - DNA, 506 bp, Arabidopsis thaliana
ccagtgtgctctaaaggtttatgacacgcgtcggtaacctgctgactgcggttacctttcgccagcatgatcatgctgccgccgtgggattgcagcagatccacgtaggagtccatacggcctgcggtggttgggccaagtgaacctgatggataaccggcaggggttttcgccggacccgcgtagtagatcgggtgatctttgatgtactgcggaagttctttaccggcgtcaatcagctctttcagcttggcgtgtgcaatatctcggcccacgataatggtgccggtgagcgacaaacgagtggataccgggtattgcgaaacgtgggcgaggatctctttcatcgggcggttaaggtcaactttcaccgcttcgccttcaccggcctggcgcagttcttgtggaatgtactggcctgggttgtgtccagtttttcgatccagataccttcgcggttgattttcgctttaatgttacggtcagcggacgaggagacgcccatg

SEQ ID NO: 26451 - DNA, 1072 bp, Arabidopsis thaliana
ttatgcacccatttcacatgttaggtgtagctggtgtattcggcggctccctttttagtgctatgcatggttccttggtaacttctagtttgatcagggaaaccacagaaaatgaatctgctaatgaaggttacagattcgggcaagaagaagaaacttacaacattgtagctgctcacggttattttggccgattgattttccaatatgctagtttcaacaattctcgttctttacatttcttcttagcggcttggccggtagtaggtatttggtttactgctttaggtattagtactatggctttcaacctaaatggtttcaatttcaaccaatcagtagttgatagtcaaggacgtgttattaatacttgggctgatattattaaccgtgctaaccttggtatggaagttatgcatgaacgtaatgctcacaacttccctctagacctagctgctgttgaggctccatctacaaatggataattcgttagtgttagtctagatctagtttagtaaaaaacgagcaatataagccttctttaaataagaaagagggcttatattactcgtttttttctataaaaatgagcaaatttttatagagtatcatattttactttatttattatattaataataaataataataataaataataaaaaattactatatattttttattagaaaaaaaataaggtggaatttgctacctttttttattttttattgaaatttgtatttttttttttttttagacaatacaaaaaagaatagatagtagcgtaggggcggatgtagccaagtggattaaggcagtggattgtgaattcaccatcgcgggttcaattcccgtcgttcgcccatgatgcccgggaccaagttattatgatttctttttccgcctttgtattaagcttctctatttttcttaataaatgctttgctacaaaagggtttttttttagtgaacgtgtcacagttaattaactcctatttttttaagacgaagaaagaaattcgattttctctcctatttactacggcgacgctgaatcaaagtctcactata

SEQ ID NO: 26452 - DNA, 1183 bp, Arabidopsis thaliana
tgtagcaccggaatcaacaatgtatgtattcccggatatatattgagaagagtcatgaatgagatagcgaaccagagaagtaagccctggatcaatggtctgttgcacctttaacggcacagtcctctcggtcacattcttgagccactccttttgcataagagcttgtgtgatctctgacttgaaaagccccggtgcgatcgagttcactctgatcttgtgaacacctaactcaattgccatcatccttgacatggtgtcaacaccgcctttggaacaagaatatgcaagtccaccgggcacgatactgcggaccccagcaaccgatgagatgtttatcaccgagccaccacgtttagcgtcacgcattaaaacacaaacatatttggctactaaccaaggtccctttaagttggtattgaagacgttgtcccattcgtcctcggacaaatccaaactcaacttgacattgcctctgattccagcattgttgatcaatgcatcgatctttccaaagatgtcccaagcttccctgaccgctttttgaatggtggctgcgtctgatgtaacgtctagcttaagagccgcggcttggattccagttgaactggagctgttgatttcagagcagagagagttgagacgatcgacacgacgagctactgcaataatcttacaaccagctttgcctagatcaagacagatctctcttcctataccagaggaagccccctgtcacaagaaccactttgtctttaagttcacaccacggctccaattgcttcaacacctccttctctccaaaaacaaaagtcaaagtttgatgattgctcatattgattgttttctctgtttatgttcgatggagaagaagaagcacatgaaaaaacttagtgatataaaaatagaagtgtcagaagatatttaatctgtatataccagactcgaacaagtcccatccataacaaaagacggtcctatacttacactcttaattatttcatcatcagatcgacaatttgtttattcgttaggtttgattttattgttatcctgattatatttgtttttttggtcaactatcaattcaacacgacgttttcaaaatgcaatgatctttttctgtcttggttttggcacaagcaacaataatgcatataatatatataagtgtatatattat

SEQ ID NO: 26453 - DNA, 619 bp, Arabidopsis thaliana
aacgctcaaggatcttgcgttgaaactcgagagcagagtcatcgaaatctccggtgagtctagaatgttccatgaaccgagcgtaaggagctttgagatgatcaggtgggagataacaagagaaatcaaccaagtaaacgggtctaggtcgggtcataacataaaccgttaacccgaagactagaatcgctgaacagatgatgatactaaccagattgtattgtagatggatccagagctgtttgagatcatctgggttcatctgagaggcttcgacggagataacaacggcgagagggaataaacagagagtcaagagatttgagattaagtaatggtaacctaatttcacatacttgagattcacgctctggagaaaatccggtagcatccgtgtttgtcggatctgaactccaacagaaccatcaccaccaccatctacaccgagtcgtgattctccggcaccgtccattgagaaaacaaagtttgattttttttgttacggaaaatgtagtgattttaataaatacaggtgtcatttattatttcatgcgctaggagaaaggaccgtaaaggagagagctttgacgaagactaccaaaagacagagttttgatta

SEQ ID NO: 26454 - DNA, 527 bp, Arabidopsis thaliana
caaggttctcaacaattgattgtgacatagcaatcttctcgacccaacataacggtgggtcggatctaaatgcagcggctttgatcctacgggtcggtttcacgtgcttctccctcacagtacaacccatgccaaaatctgaaactgaaagagagattgaaaaacagagagacgataaaaatgaaaactttaccaaccaaaaaacatgggtttgaagaaatggaattaatttattgaataaataatgattcgatgatagagacggaggatacgaagaacttactgatcggtggtggtggctgaattttctcggctaagagaagatgagagtttcggcgaaaaggttatgcgagagagagagagagagagagaaactttgtttcggtttcttccatttctggcggcgccagagaatatatttacgggctttgagccattacttgactgaacttatttgggcccatatatccgaattcaaaccgacagcgtttattataggtatgggtaaaatcgaatctgttgtttgg

SEQ ID NO: 26455 - DNA, 930 bp, Arabidopsis thaliana
gtttataaatcacggaattgtatatatgccatttcacatgtcatttataaatcacacccttgatcagcatgcatggagttaatttcttgccataagaatctcgtgttaatttacttgttcttacaaaaaatattaaaacgaaaaacaaatgcaacaacttgcataaataatattccttcttgacaaaaaaaaatcaagttttgccgtaagcacctaatacggtaacctttattggattagacgcgcaagtgtgttctttttagcttcgcatcaaaacaaaatctgtctagtataagtgttactgttggtggaagttgtgcagtccgtacttgaccacttcgtaaaacgataccacaatggctacagatggtcctgctcgtcccactctagcccctgctccactaaacatccctctcatccctccgtccctataccaaaaacccgaccgggatggttaagtttggaaacacgaaaattgtctaatggatctctaactcatacctccaaatctctgccaaggtttgtcttgtggtcattgtcatggctctatctgtgttcttctgcataatccaaacaaatttaactgttacttggtttaagatccaaaacttacttaatgcaagctggcgatgaattctagtttgtagagcaacacagtggaattatgaaagatgaagtgaaaaaggtatgtttacctctatttgacgcctagtctttgcaacatctagagggcaagtagctgctgcagcaactgcacccgcaacaaaaccagcagcgaagtttgcacctattatactgcctgcccttggttcttcacccatggccgactgaatgcttctccgggtctaaagtcacaatgaaacaatcgtgaggacatggatggaagacacaatgggtgaatatggatgtgtttttcagagacagattaac

SEQ ID NO: 26456 - DNA, 717 bp, Arabidopsis thaliana
catccatgatatatacaagtatgagccatttcaatatttctataaaatgtactcaataacttttttgttatccaattacaaaggtaactaagtgatatataaaaattggcttctaatagcacttttattgtgaactcaagcatataacaaataatatatagggacagcacgaaaccctagtgattaaaaaagaagagaaaatgcagatggagaagtatatcatctcaagacgaattcaaatattcatatatgatcaactaaattaaaaaccaaacgatccccaaacaatgaagatgattttttttttcttttaattttgagaaatgaaatttggttacagctatgttacggacataattttcaattctaaaaggctggtcttggtggtgcggctgcggctgcggctccccaaccaagcaaatgaggatcaccggcaaactgatcataaccactcatgttacctcttaactgtccttgaccggctccagatggtggtgatgatgacgtggccggcggtggaccaccttctcctcctcctccctctccaacttctcctccctctccaccttctcctccttcatcttcaaggggaagcctttcgaaagttgcattagagaacgatgcagccattagtatcactggacccgaagccacaagcggagcaccacgtttcctccaatcacctgaccttgaacgccggaaagaaagatagaaaga

SEQ ID NO: 26457 - DNA, 1243 bp, Arabidopsis thaliana
gttgtccttagctcaggaactaaagacaaagaccagctgtcatgttcaacaaatcaaaacgacaaacagatttgcagtattagacattgaggtggaagcgtgatgacctaattctaaagtgcataaataagccttaagttgtatcagaaactctaagagagaaagatataaaagaagcaatgcttatcttattctccaaacactagacactgtgtttactttcatgaaatcccacaccactgatgaaaatttggctacaaagtcttgatctgccaacaaagggaaccagaccactgcaaagagatcaagactatgactcaaatacagaaaaggtatctactacgctatttactccagatgattttccaccattacctgtcagcagtcgtgctgtagtgattcctgagagtggagagcagagttctgagtgtacgacaggctttgatcctgcttctattggcaacaactctacctcttcaccaccagggactcctacagctacacaagcttcatcaacatcatctgaaaagagtaaaactccaacatcaataccatctacaccaacaacaccacaaaggtcatcaactgaaagtactgagacaccgatgtcctcacctgtcataacacaaccatcaccatctgcaagcagtattcctacaatgcatgcagctacatcctctgcttctacatctcaacaatcatcagtggcgagcaataaaagcactactgatgttgttcaaatacaagaagcttctccgaaaagtacagctccttgtatagaagctcccgtggaaaaacagcctacacatacaatggtaaccagatcaaaagctggcatccataaaccgaatccaagatatgcacttatgcttcataaagtgtcatatcctgaaccaaaaacagtcactgcagccatgaaagatgagggatggaataatgcaatgcatgaagaaatggataactataaagaagctcagacttggtcgctcataccttatacaccagacatgcatgttcttggctgcaagtgggtctttagaacaaagcttaatgctgatggatcccttgacaagctaaaagccaggatagttgcaaaaggctacgatcaagaggaaggcattgattatttggaaacctacagctcagtggtcagaacagccacagtgaggtcagttttacatgtcgctactataatgaattgggaagttaaacagatggatgttaaaaatgcattcttgcatgg

SEQ ID NO: 26458 - DNA, 681 bp, Arabidopsis thaliana
tattcacttagaacaatctacatagtcaaaaattagcaagaaaccatatagggttactttgtaaactttcacagaaccattgaatcagcaagaatatgcaaaacactcttaaagctaatccctttctttatcagcttatcttaagttattcatagcagtgagaaccagacactaacaaatgtaactcaacagattaaacagaaaaagtctgaaactttgaagaaaccgaaaatcagatatgaagcagattaaacagaaaaagtctgagactttgaagatattgaaagtcagatacgaagcagattgaacactgagagtgacctaatcatgcccatcaaatcaatcttcagaaacccagatgagaaattagagattttgagcaattgagagagacggacctgagtcatcttgggtcaaagtaacaactccttcgacatcagaagtacctttaagcactgcaacagccttcttcgccgcggaaacaactgtcaacgctttcgacggagctttaacggcgaaggaaacagattggagacggtggagattgttgttgttgagagagacgccgcggaaagaggaacggagagttgaaggattggaggaaggaggaatgagaagacgagaaggagatgagaatgcgaggattgtgttggtggcagcatggctcgtgctatgttgacg

SEQ ID NO: 26459 - DNA, 957 bp, Arabidopsis thaliana
ttctagaatactgaaacttgaaatattggaaatgtttcatttaatatagtgtccacaaaatttttacatttgaatcactattttagtattcaagtttgataaccaaacaatatttataacagaacgataaattgttactcaaacaaactacacatcgtgcatatattaacctagttggttaatataatgtaatgatgcatgtttcatcaattccttttcttttcgctcaataactttctgaaccattttgccgatttctttggatatctcttacgtccatcgttgaaatccacgtaaactagtccaaatcggactgagtagcccgttgcccattcaaaattatctagcaaagaccacgcaaagaatcctttaacattggctccaattgatatagcgtcttgaaccatcttcaaatgttgagcgtagtaatcgatcctctcactatctttaaggtcgattttaccggtactagcttcatctctaccattttcggttatgtacatgacaggatccttgaacttgtattttgcatagagaaggagatcacgaattccttttggatatatcaaaagccaatctgatgctgcctttggaccgataggcactccttctctttcacctgtgacgctagcacaaggatcagagaataatgtaacgttttcgcttgagcaaggaacatccttagcgtaagaagatgagtaataatttctgccaatgaaatcatatgatcccttcaacattttagattgttttgcagtaaatgtaggtaagcgaccgcgttttacgtagttgaccatgtcaatcgggtatttaccggttacaagcggctccatgaaatagtcgaatgtgaaggccatagctcttgccgcagctaacctatcttcagctgattctgaataaggtaagttccaaccgcgtttaaggcgataccaacttgacctttttgagatccttata

SEQ ID NO: 26460 - DNA, 635 bp, Arabidopsis thaliana
catcatttgtaataaatcaggcatatgttaaactcgctaacctatgcctaatattggtagattatatttgttttcgagatataatcttggttgtgcaatgcgcagataactcccctagtttttaaatttattgcaagtacgtaatacatcacttatgtgtaagacacgtataataaaattcaaatcattctcttaaaagttaatcttaccatcaaaagtctgtccaaatccccaattttttggcatcacattccaaaaatcttttgtaatcccatcagtcgtcgtaactctgaacgacaaaccttggccggtcaatactgtactagtggtccaattctgcccccagttctttttcattgttatccacccggtcttgttttctttaacttgcacgtacttaatatctccagctcctcctacgttgtatatcaagaccattaagaaataagggtttcctttggtttcaaacttgacaccaccagttttgctacaaggaatacgtctgtatctaactgggacaacccggctttgtacttggcaatcttgagaaacattgctaaggagagacaaagtgtttctgtggtggattgcacaaaggtctgtggttttgctgtaatttgcgggacagaagtttg

SEQ ID NO: 26461 - DNA, 590 bp, Arabidopsis thaliana
gaggatcggatcccgctcatgaaagaaattcgtttaagtttatgtttggatttggttcagatcatgatcaagtagtataaataatatcatttatttttaatcattggcatacaaaactgaaatcattctcctaaaagttaatctttccatcaaaagtctgtccaaatccccaattgtttggcatcacattattaaaatcttttgtaaccccatcactcgtcgtaaccctgaatgaaataccctgaccagtcaaattaacaccagtggtccagttttgtccccagttcttttgcattgttatccacccggtcttgtctcctttaacttgcatcaacttgatatctccagcgcctcctacattgtatggcaagatcattaagaaataagggtttcctttggtttcaaacttgacaccaccagttcttgcacaagaaatacgtctgtatttaactgggacaactccagctttgtattgggcgatcttgaggaacattggtagggagaggtcaaagtgcttttgtggtgggttgcaccaaacgcttcggttttggagtaatctggtggacagaaatttgttgctgtaacttgat

SEQ ID NO: 26462 - DNA, 947 bp, Arabidopsis thaliana
cagttagatacagacgtattccttgtagcaaaactggtcggtgtcaagtttgaaaccaaaggaaacccttatttcttaatggtcttgatatacaacgtaggaggagctggagatattaagtacgtgcaagttaaaggaatcaagaccgggtggataacaatgaaaaagaactgggggcagaattggaccactattacagtattgaccggccaaggtttatcgttcagggttacaacgagtgatgggattacaaaagatttttggaatgtgatgccaaaaaattgggggtttggacagacttttgatggtaggattaacttttaggagaatgatttgagttttattatatgtgtcttacacataagttatgtaatacgtacttgcaataattaaaaataaagaagatactatttatccataaaaaattaggatgtatccacaatctatatttatactattatctttcacttctacatgtaacctcttttaaaaatcgtatgttgtttgtggtttggaggcataggaaaattggtcgcctccaaggggaaccggctgacttttgatggaaagatcaacttttaggagaactatttgagtttttttactttttaggataagaaggaatacaattaaaatgaattaacagatgtattgggttcaataactaaaaataaatgagatatgctttattatgtgtagttgatggagtgaagttttttacttctatgtttccatctttttatttttttgccatggaatcaatttacagatttgttttgtgaacctaattgtttaaaataaaacatttttagatttttttctatgtataacatgatttaaaattttgaaatctcatacaaattatttaaaatagtgaataatatttggctaaaacacaaatataaaataaaactaaatagtatagaacgaacattagactaacaaag

SEQ ID NO: 26463 - DNA, 897 bp, Arabidopsis thaliana
accttgtgtttgaccctactcaagattctcaccatgacgcaattttgggaaccctaaccaaattgtgtaagtcaagaattcttatgttaagtatacgcattggctagttgttcgatatactaactgggacgattttttcatgtataaagattctttgtagacgatgtaccgatacgtacatataatagaaagaatgaagctatattccccacaagaccgatgtgggtttacggatcgatatgggatgcatcggactgggccacagaaaatggaaggatcaaagccgactatcgataccaaccatttgtggctaagtacaaaaactttaagctagcgggatgcacagcggatagctctagctcatgcagaccgccatcgcctgcacccatgcgcaaccgcgggttgagccggcagcagatggcggcattgacatgggcacagaggaacttcttggtctataactattgccatgatccgaaaagagaccatacccaaacaccagaatgttaaaacaaacaaacaaaagaaaggttataataattttattttgcattatcaaacatacatgaataattggaggtcttgtgacgggtccacactggaaactatattgaagcagttgagcgtccggtcctctatgatttgagattaaaaagaaaaggttttgtttttcaatactttgtaatgtttccatttggtatctttcttataattgtaatattgtgtgatcacatatattaatatctggtattgtattgttgtgtgaccaaaaaagaaagaaaaagaatggaagttgttctttcgaaggtggcttaaattatttgttggatttatatattaccaagtgaatctctgaatctacacgataattattagattagtggttgattgggaagt

SEQ ID NO: 26464 - DNA, 1319 bp, Arabidopsis thaliana
cttctctttcacaagcttcgcctcggcagccttggaaattgcctcgtcccgagcgcgttcggcggcgactaatctctcctgggcctcgaccagcttattgatgcccccatgttgccttaaaaggcggaatcatgggattgcaccatcctattcatcgagttaaagacctgacaaaatagcgaaaacaaaagaatcatacatataatttggctccagagtaatgaaagttgaacataccctaaggaagtgtgacgccgtatcagcgtatagctcaaactccagcaaagtatctggaggaggaagaagaaggcttgcacaagcgccgatgagatttgccgaagcggctttgtctgtaaaaatcagctcatccatcttccgactcgcctcttgatccgcctgcttcttcttcttctttttgttctttgccttgggttcggagatcctctaacgtttccttgaagccttggagcggtcacgagtaggcaacacaaagaagaagtggaccacaaagaaggagatcttcgggaatagtagcatcatcaagggccacaaagaagaagtagttagtgtacgactcattcttcctcgggaatccccagataatcttcctgtctttcgcaggagaggtataatatctgtttaccgttgacttctggattcggcggatctccaagcagttcctaagatgcgtgagcatgagatcggtttctctctcgtaacttcacaccaaaatctcaatgagatgcatcagggcacgcgtagtaagctaggtgagtgtgatttgatacgatgtcacgtactctaaaatcaacctcgggatagggaaccagaggaaacagaaatagaagaacccctcgtataaggttaagaagccctcaggaggattgtcggctcttttgcttggcgttgggaagacaaagagtgacgccttcacttaagttgaaccgagccgccagatctcggagagattgctcaatatagaaggtcgaactaggtgggtcgggtatcacccttttcgtccattttttctccttcttcttgctgctcagaaaatggcttccattttgttcggcccaaagaaaaggtgctcttcaacttttacgtagagtagcgaaggttcgggcatatcctgccagtttaatgtcccggcttcattcgtagctggggcgcgactccttcgaacgagagatggctcggtttccttaggaagatctagtcccaagccatgtatgtggtggtatcccccgagccacgaaaggggttggctctcatgacgcgcgtcacttcatgctcgaaatgtcggctcgcgtcattgggtg

SEQ ID NO: 26465 - DNA, 1359 bp, Arabidopsis thaliana
gaggatcacgatccccggataaggcattggttcttcattcgttttaaaagcaacaatctccaaaggagtgaatagtaccgcgtttctcgtcttcatgggtgtggcactctctatcactgcattccctgtgttggcccgtatcttagcggactataagcttctaactactgagataggacgacttgctatgtcggcagctgccgttaacgatgtggcagcttggattctacttgctctagccattgctctctcgggatccaatacctctccccttgtctctctctgggttttcctttccgggtgtgcttttgttatcggtgcgtctttcatcattccaccaatctttagatggatttcccggaggtgccacgagggagaacctatcgaggaaacctacatctgtgccactttggctgtagttcttgtttgtggattcataactgatgccattggaatccactccatgtttggtgcctttgtggtgggtgttttgatccaaaggaaggaccttttgctggtgcactagttgagaaggtggaagatcttgtatccggtctcttcctgccgctttactttgtggcaagtggtctgaaaactaatgtggcaacgatccaaggagctcagtcttggggtcttctggttttagtcaccgccacagcttgtttcggtaagatattgggcactctcggtgtttccctcgccttcaagatacctatgcgagaagcaataacattaggattcctcatgaacactaaaggattggtcgaactcatcgtcctcaacatcggaaaagatcgaaaggtataactttttcaaatccttaacaatttgcgtcatgaaagtttataacttaaatctttcttttgttgtgtcctcaggttcttaatgatcagacatttgccataatggttctaatggctctcttcacaaccttcatcaccacaccagtcgtaatggcagtctacaaaccagcgagaagagcgaagaaagaaggagaatacaaacacagggcagtagaacgagagaacacaaacacacagcttcgaatcctcacatgtttccacggagcaggaagcattccttcaatgataaacctcctagaagcatcaagaggtatcgaaaaaggcgaagggctctgcgtttacgctctccacttacgggaactatcagagagatcatcagctattctaatggttcataaagttcggaaaaacggaatgccgttttggaacagaagaggagtaaacgcagacgctgatcaagtagtagttgctttccaagcttttcaacagctaagcagagtcaatgtccgaccaatgacagcaatctcttcaatgtctgatattcatgaagatatct

SEQ ID NO: 26466 - DNA, 783 bp, Arabidopsis thaliana
catgtcatcaaaaacaataaatgactttatgacaaaatagttaggaacactaacaaaaaaaactattgggcagaaaagagattcttaataaataagagggtgataaagaaaataataaaaagactagggtgagtgaattcaagggaatagaaaaagcagagctctctctctctttttagccctctctttcaaagttgaagtttttgaaggcgtctccggctacacagcaatggcttctggatcagactcagaagtagaaaaggaatccatacaccacaaagcactagcggaatcgagtttcaattgcggtgatttgatgtcggccttaactcacgcgcggaaagctctcagcttgtctccgaacacggaaggtttatccgccatggtcaccgctttcgagatcatcagctccgccgccacagtcgccggaggttttccggaatggtacaaggttctaaaggtagagcctttttctcatattaataccataaaacaacagtataggaagctagctttggtgttgcatcctgataagaatccgtatgtggggtgtgaggaggggttcacactcgcgaatgaggcctataggattctctctgataaggttcggaggactgagcattatatgacgttgaggattaggattcagggggaaatcgttagcggtggttctggtggtgatgaaacgtcaacgtgcgcggcgatttcatcgggttgtaggtcggtgcataagtttgataggaagtctttgggacagaatctgatgtgccctacttgcatgac

SEQ ID NO: 26467 - DNA, 857 bp, Arabidopsis thaliana
tgaaatctaatccaacaaaaacaatagagtaataacagacttggttggccagtacaacaaacctccaaggtgagcaatgagtaacggcaatgcaggtaatagagcttttgtttcttcaggttttccagcagcaatgttggtaagacaccaagctgactcaagtaactgcagttagacagaactgtgatcaaaagattacaactctccttaatatatcttctttcaatgcatgagttacttgtcaaaatctacagtaaagtgccggacgaatatataagcaaataaatgcaagaacaaaggtatagtattaaagcatatataaggcaaatgtaacctgttcgtcgggggagccaaatgaaagacactgcacaagtaaaggtattgcaccagcacggagcgcagttcaacaggagggaactcagattttgataataaacgcctgagttcccgaagagcagtcaccctcttctgcattgcaccttttcccctgaaaattgagataagaagtagatatcagaaaaaaatcacgaacaatacctgaaacagtgaagaaaacgaaaagaatgacaaacaaaaattgacagattcacttactggtattgaacagcggacttgagctcttccacagatttactggcttgagcctccaatataggctgctcttcatcaaccatcatctcattctcaacaagagcatcctcaacatcgccattagtacccacctacaaagccgctttgccctaaccagtaattcccttctttccttcgccactgtaacagcttgttttcgtcttctttgtccgcaacatttcaactacacacaccattccagaattcaatcagatcatgcaccaatt

SEQ ID NO: 26468 - DNA, 585 bp, Arabidopsis thaliana
tatataattatgtcatttttttctttactatattatatatccacaataaacgtgaggatccttatcttagttcaattaacgtttttatgtctatcatttactaattacacaatttcttaaggttggagcaccaccggaggttgtggcgaggctagaggaggcatgctcgtctgccgcagccgctgccgcatctatgggaccaacaggatgtctaggtgaagatccagggcttgatcaattcatggaagcttactgtgaaatgctcgttaagtatgagcaagagctctccaaacctttcaaggaagctatggtcttccttcaacgtgtcgagtgtcaattcaaatccctctctctatcctcaccttcctctttctccggttactctctcctctctctctagttctctgtttttttttctttctttttaattcatattcttgttaattatggcgtcaaattaaacgtaagatgaggaaagttgttttttttctttgtgggttttaagaaagattttcctttttctgatttttcttgggtaaatacccctttgatggttgttactagggttagtgtcagattgttata

SEQ ID NO: 26469 - DNA, 484 bp, Arabidopsis thaliana
ggaagtttatatattttgttaatcatcccataattcaactaaacgtagcatacaattttaaatcttttttttataaaatgcataaccataaatataataatgtctctaatgaaaaaactcaaattacatataaaaatcaatttttcaagcaagctcttaaaggtttaccacaaagacagtcgttaaacataaacgacgccgcttcaagatgatcaaacggtgaacctaccggaatcctcccacagagatggttatggctaagatccaaatgaccaataaacgacgcacctgagatcgatctcggtattggtcctttcagattattatacgacaaatcaagaactgtgaagtaagaccttggtccaaacccttcaggtatcttcccttgtagcaagttccggctcaaattcagattcatcaccgacgacgtcatcagagtttgaggtatctcgccggagattttgtttccgtcgaggttaagtgt

SEQ ID NO: 26470 - DNA, 1353 bp, Arabidopsis thaliana
atgtacagactttctaaagattattaaattgtgctttagaaaaacatgaatttacagacaaaataaaaaaataaaattatttgggctgtgagaaaaaaaagaaaagctaaagcaagattgtttcaattttgaggctgtaacttttttagtgtctttaaaaatttcttacagcccaaccaatcatagacttcgtccgatcacaatataagaagatgaatagagaaaaaaccttagattccattccaattgatgtctttctcgatatcttctcgagattacctgcaaagtcagtcgggaggagttgttgcgtgtcgaaccgatgggcctccatacttggcagtcaagatttcaaggagttgttcctgaccatgtcttcgactcgtccacgtctcttattcgccctaaaaccatacaacggtgatgagtgtctcttctactcgtcacctcaccctcataatcactatgagaagtctactgtagtagtaacggccgattttcacaccaagttccctaaaagccaaagtgattgtatctacgcctctggtttgttctattttcctgatgtgcggatctcaaaagataaggacgaggattccgtgcatgtgataaccctatcacgggaaactatgcgatcttacctaaactgaggacaaggagagataccaaaagatttttagggttgatccaattgacaagcaattcaatgtattactcatcaataattcagttaattatgaaacggttcatcatattctgacattaggagctggaggaatatccaatgtcccttaacccattatcctcagggtaaagggatatgcatcaatggggttttgtattacttagcgagtcatgatgaaaagccatatatgatagttagctttgatgttaggtatgagaaatttaggtttattaacaaaaaatgccattcttatgaattgattaactataagggtaatcccatatggccttgtttatacattattggctcattttcacattttgcgtaaccaaattaaatattgagctttattactctgtttgcttatcatattgtttattttctggttatgatcgtgtttacatgttactttgaatttacttttaccaaattactatatgatcttgtatataactgccgttttaatccctatcttaaataaatatcgtaagaaaaggtggatataatataagctagcaaaaatgtttcaattgatatttttgtagatatcattgctgagaagctaagagattttgatttctcaaatctcagtttcttctcaaatttaatgtcgtacttgttgtaaaaacgatatttttctttgaatataatttaacattagatacgtgata

SEQ ID NO: 26471 - DNA, 809 bp, Arabidopsis thaliana
ctaacttcccttggtagtccaaaagggtatagagacccaaatagacaccatgaatactacaagcctcggccggcatttcaatgaacttaccaaacttttccgtcctcacatcgaacctcacaattttcgctccatcccccgtataagcaccataatacagaaccccgtgggtgcatactcctctggtttctggagagtggaaattctcatcggcctcgatcattctccacgaaccttcatctccaaatgtgaacacttccactatataaggagctattaaatgttctcttgacaaatacaagaccttgtattgataattgattggatcatatcccatataccatgtcgtgaattgtttacggggaccgcaatcgggaaaaagtgtgatctttttcgtgacaggattgcatatccacagtcgaaacatgtgttcgacacatatcaagccattgacgcaaacaggcatacaataagaagtactatcgatattggtaactgaagaaggtggttgagataacgagaagaaattccagcgaaaaaatgtgtttgtatcacggaaagcaaacatgacacgtgactcacgagtagaggctcgagattggtataagttgatgaaatgtcgactgcggatgattgagtagcaacgcttggatacgcatagaaatctcgctagtgatttcacaggcaatcttaggagaatttcgaccaaagggtcttcaggaatcataattaacttaagaaaaagctatagtactttttttttggtttttgataaaagtgttatacatctttctcatctatatagattg

SEQ ID NO: 26472 - DNA, 638 bp, Arabidopsis thaliana columbia
tgatgtttgtcgtgtatactatatatatacacattcatgctatcttccttcgtctcgtggtatagttacttacatgagcatcaacttcacttatagctaacttttttcttctctttctttctctctggctcgtcgcttttagaaaacgttaattcaatatggctaaaaagaacggaacgtcttggttcaccgccgtgaaaaagattctctggtcaccgtcaaaagactccgacaagaagactcaccaccacaaagaaaccgatattaaggtcttattttaattctctactatgaattactacttaacctcgtctctaaatagacttttaacccgtaagtttcgatcttttgtggctaactgcagagaaaagaaaagaaaggatggatttttcgaaagaccaaactcgaaaccacaaactctgtcttacaacatactgtccgtacggtggaggcagaggagaaagaaaaaccgccggtgattgtctcctccgtagaggaaggtgtcacgagatcgttaagctaacggcaactccgggttttattagacgtcattgggctgccattattattcagacagctttccgaggttcctcgtaagtaaaaaacgaacaaacaaaaaacgttttttttttggtatg

SEQ ID NO: 26473 - DNA, 1460 bp, Arabidopsis thaliana
  unsure (1)..(1460): unsure at all n locations
gtcaaaaactaaagtcttttagactcttagtaataaaatgttgaataagtcttgttcgacgcctcttattgatttattaagaaattgaccagcatgaaaaggaggcattgctactatgtaatgtctgggggggagtttcacatcgatataggctattgatgggccttagtatgaagcccgtaagcccatattgaagctcgagtcttgatggcgcaggagagagagaaaaagacaatcacctgtagtaatctttgaagactcttatctcctctatccaccaagagagggaaaacgaaataaaaatagcacaggggagagacaaaatgagataaggatttgaagcctctcaccactctcctcgttttcgcttcgtgcttatttgtcaaacgcgaacatttcaccgaaacttagcgacttttctcgctttactctttctgggagcaatttctcagagcataggcgagcttaaaggtagctccttttcttagctttgctcaaatgggtttcttagttactcttcttatgtttccgtgataagatggttcgaaatttactagctttcttaatggaaatttttgagtttttctagttagactacaatgaaatttcaattcgaaattgagaaaaagagtggtccttttcttcatatgctttcagattagtctgtgttgttgtctgaggaaagcttgtaattttgacagtgtgtaatggttttctatgtgtaggtgacagttcttagctatggctacgattacaccttcttctattagcaatgcctggctcattcctggagcttcttttactgtaaagaagagtgattgttccacaaatgtagcttttcgcgtaaagctgggaaacagattctatcatcaacgcagagacttgtgttacctttgtcgacttcacttagattgtttcctacacatggaaggcagtttgtgttgcatcctcatcgtagagctactgggactgatgttgtggcggctgtagaggaacaagattctactcctgttgttgcggaggataaagaaaccgtggctagtgagaagtcagatgctcctgctccaacatctcagtcaaggggaacagcaagacctggaaggaagagtgagatgcctgcggttaagaacgaggagctggttcctggagctactttcactgggaaagtacgagctattcagccttttggagcttttgttgattttggtgcttttactgatggattagtccatgtttctcaattgagtgacaactttgttaaggatgtttcgagtgttgtcactattggacaagaggtgaaggtaaggctagtggaagctgacattgagtcaaaacgtatttctttaactatgcgtgagaatgatgatctcctaagcgtcagtctggtggtagtgataaccgagatcaggagggnaaagggatggttctaaaggaggaggacagaggaagggagaagggtt

SEQ ID NO: 26474 - DNA, 590 bp, Arabidopsis thaliana
caagaaaagaaaaaaaaaacgtttttgattaagttagaatgttatgtttcttacaagactgtgacagtaattaactcctgatataagctgctgaaagaaaaaccttgcctgaaaaatgtttcttacaagacttttaggttctttctctttttaaaacaaatgtttatttagataataatgacagaattgataaaattaaacctcgtcttcactgaatcttccggcgctgcagattcttccgaacagttctcctccggcggcgtattccattactaacgccaaatgtgttgccgtcaataaaacctatgttttcacacaattatcaatttgatagataaagtaacatcaaaagagaagacattgttgtattatacctccttgaatcttattatattgggatggatcagcgacctatggttcatgatttctctttgtacatgttcatcaatcttcataaacatcaacaaataaacaaaatcagacaaaagtgatagaaacaaaaatttcttgaattaggtgcaagagagttagagaccttttggcctcgctcgatgaacttaacagcgaaaagctctttggaaaatttgtca

SEQ ID NO: 26475 - DNA, 927 bp, Arabidopsis thaliana
ttttggtcgaaattctcttaagattgcctgtgaaacccctagctagatgcctatgtgtgtgcaagctttgggccacaatcatccgcagtcgatatttcatcaacttataccaatctcgatcctctactcgtcagccatatgtcatgtttgctttacgtgatatattcacatcttgtcgttggcatttcttctcgtcatcccaaccttctttggttaccaaggcgacatgcagcgccaataattcttctcatacgcctgattgtgtcaatggcttgatatgtgtcgaatacatgtctcaactgtggatatccaatcctgccacgcgtaagggtgtactcgtgccccaatccgctccacatcaaaagttcaggaaatggtatatgggatatgatcctatcaattatcaatacaaggttttgtttttctcaaaacaatatttattatctccctataaactggaagtgtttacattggaaggtcaaggttcatggaaaatgatcgaggttgagaatattccttctccctcaaccagaggaatatgcatcgatggggttgtgtattacggtgctcagacggcgcatggactgaggcttgttagattctacgtggctactgaaaagtttggtgatttcattgaaataccggtcggggctagtaatgtttatgatatgaactttggttactctaaacttgtgaactatcaagggaaactagctttacttgctgcaaaaagtatgagcatgtatgatttatgggttttggaagatgccgggaaacaagaatggtctaaggtttctatcgttttaactcgagagatgttttcgtatgatcttgtttggctaggtgcggtgggttttgttgctggtagtgatgagcttatagttacagctcatgatcgattttatcagatttatcttgtctatgttg

SEQ ID NO: 26476 - DNA, 547 bp, Arabidopsis thaliana
tcaaaccacaaaattcaataaagataaaccatttcgttgattaatgatatgattaccagaaatagaagtgaaattgaataacgacaaaagcaaaaaaagtcaaaattatgtaaaaagttaaaactttgaattaagaagaaaagatcttaccttgccgagggtatgagcaagggcagcgccggcgacaccagcaccgacaatgataatatcaacgtctgttccagatttcaccgttagggttccgttacggacattgacagacccatgaatcgtcttgctccggcgacgcaggacgtatagaagcagaaacgcgaacaaggatgcgacaaacgttgttgtgaggatacagtgatcaacgaatatcgtcggagccattagcgtacacagagagatttcaggtggtgcgttttttgattaatcctccgccgcaatcccgcggctattgccggtggttcaagccgttggttttacgaattgacgcgtggatatagaaggagaagagaaagatcaagtctttatttggtagagaaagattattgtggctgtg

SEQ ID NO: 26477 - DNA, 530 bp, Arabidopsis thaliana
catatcattaatcaacgaaatggtttatctttattgaattttgtggtttgaattgtttattagtttatttatcgtctagctcaatcacattcttgtaacacaagttatgttttaggtttctctatggacaatggttttcttaaagataaagttgcgaactttcgccttaatatttcaaaatcttgaaaattctcgtgattcttaattcacgggtaaacgtgttttgcttgttgcgttttttttgccgtcacggaatcaaatttagtgactttagcttttgtgtgtatgtgtgtgtgtggttgtaggaaggaagaagagttcacgttatagaaagagacttaacggagcctgatcgaattgtcggtgaattacttcagcctggtggttacttgaagttaatcgaactcgggcttgaaggttagaccaaatcaactaataaagataataacttttgttggattagtaaatctgacttgtgtgtattgatttggttctacttggttattgtagattgtgtgaaggatatagat

SEQ ID NO: 26478 - DNA, 820 bp, Arabidopsis thaliana
tattttgattactcttttaccgtttgagtcatttaatgtgttgctttcccacctccttgttcgtgttttctctggtcaatgtttgaactttccttaaccaccttgtgcttgttatgttggatttccagatttctgtacggtgagcaggctcgtttttacaaagatgagattcatcttgatttaaaacattcaaagaccggcactgttgcaatggccagtggtggagagaatctcaatgcttcccaggtaagcttaatcatttttgcctgaattactaagtttatgaaatctcttgggaaaagaaatgttctggtgatcgatatgtcctcatgtgaacttatctattctcttttcagttctatttcacacttcgtgatgatttggactatcttgatgggaaacacactgtaagtgcaagataataaatgatctgcctaatctttctttggtatatatcggtcacctttgatatgccattttatgccatttttaggtgtttggacagattgctgaggggtttgacactttgactaggataaatgaagcttatgttgatccgaagaacagaccctataagaacattagaatcaagcacacacatatacttgatgatccatttgatgatcccccacagctggctgaaatgatgccagatgcttcccctgaaggaaaaccgaaagaagaggtcaaagatgacgtgcggcttgaagatgattgggttccaatggatgaagaacttggtgctcaggaactggaggaggttatccgcgaaaaggcagcccattcaagtgctgttgtacttgaaagtgtaagtatcacc

SEQ ID NO: 26479 - DNA, 835 bp, Arabidopsis thaliana columbia
ttttagtcaaaagtcctatgccacaaatgtcttatataatttgattccttgctggtgagagtcacaaaacccaacagacttcacactttcactttcattcgctttttcttctctattactgcaatcacttgttcacgataatggcggacctctcctctgtcgatgagttcctgaatcagtgcaaacaatccggcgacgcagcttatggcgccttgcgatcggtcttggagcggctcgaggatccgaatactcgatctaaggctcggatcttcttgtctgacatctacaaacgcgtcggatcttctgagacgtctctccacacctaccattttcatatccaggacatctatctcgatcaatacgaaggtaacatcatcgatccgattctttgttgtctctctttcacgatccttgagaattgttctgtgataatttgtcaaatggatttgattcagctgattatactgatttggtgattccctgtgtgtaatctcgccgatcttacgttactttgtttagttgacttcatgatcgattaaaatgatctgatttctggcttcttttgcttgatttcccggagaattgggatgattccggtatcaatctgcgcttttgtttactggaatcgccgagtactcgaaaaacacgtctgcttgattgtctaatgaataggctacggatatagaaatttagcttttcgagatcttttgtcgttttcttaggattttagtgacatagtgaagaactacacatttcacttctttttctttttgcatccttttattacgcagacgcatcgtatgtctacttttattgctgttggtgccaagagagt

SEQ ID NO: 26480 - DNA, 578 bp, Arabidopsis thaliana
tagaaataatggcgattctgatgagaatagcaatggagagttacagtttaagaacgttgaaggggttacggattggaaatatagagagaatgagatggagaatacgccggtggatgttgtacttcgtcttgatgagtgtttagatgattatgatggagagaggctttcgattcttgggagattgaagtttcttgaagagaaactcacagatcttaataacgaagaggacgacgaggaggaggctaaaacgtttgagagtaatggtagcatcaatggaaatgagcatattcatggcaaagaaacaaacgggaagcacagagttatcaagtcaaagagattacttcccctgtttgatgcggtcgatggagagatggaaaacgggttaagtaacggaaaccatcacgaaaacgggtttgatgattcggagaagggtgagaatgtgacgatagaagaagaagtggatgagctttacgagaggttagaagctctagaggcagatagagagttcttaagacattgtgttggttcattgaaaaaaggagacaaaggtgtcatccctccatgagattctgcacatc

SEQ ID NO: 26481 - DNA, 561 bp, Arabidopsis thaliana
cctttctgatacagaacagcaaacggattaccatcattgtcatatgcaatttcagctcaggccaccgatggtgttagtgtctcagcttgcccatttttcatagtgtctggaaagcaggatggaatcacagcaaaagatatgtggcaggctgtcaaagaggtttgatatatccttccatttgttaagaggccttggatataattgtattattcttcaccatgagatttgatatccacccttgtatttgttacagaatggttctttcgatcacttaaaggcttctgaggcgtcaatgcagtcagatcacggttcatccattggggcagcagtagcagcctctgtaacagtcctaccgggagagtcacgcattgtcacattttctctggcttgggactgccctgaagtgcagtttcctagtggtaaaatatattctaggtaagattttctacagattcttctgaatggtgatagctaaaggcaacctattaaacagaatcttttcaggcgttacacaaagttttatggcaataatggtgatgctgcacacaaattgcacatgat

SEQ ID NO: 26482 - DNA, 1005 bp, Arabidopsis thaliana
tatgagttattagccaaattagaaattaaaagagtattttggtgtggcgtgcgagaaccagataccttcataccttccttatttggtttttgctcccgtgttgcttcccatgtgtctttggtgttgaatgtggcctgaaatcgatcatctttacctctccaaagaactacatcctctgtatcgactagccctttggaccaaagctcctctattaaatcctccgatccatttggtttaaatgtacgactcgatgccttctccgtttatgcgttagtagtacttcgtaaatgttccttttacgtgacgtctaactgcaaaccaattcgtattatctctatctagaattatttttttcaaaaatatacaaggtgtactatataatatgatattcattcatatgatgatatgacaacactatcattttcaatatttacatttcttccataaccgcaagctagcatgactcaatcaagtcaattcaaaaggaaatctacgaatttattgaatttgtttctatttctggcaactgataaaaatagtcatacgtatatataaagtcttattactagttcaccaaattaaaaccatgcacccattgaccaaaaagctcttccataaccaggtatacattgcatggaaatgtattgatctttttcaaattcaagaatagtctatatatatatatatatatccaaaattaggtgttgaacaattcactaaactaaaacctttgagctagtaacacaaatggctcaatcatctggacgcgttgcttatgtggcggttacggttccaatagctattgtcatgacagtgttgtgcttgtttctagccagcgccgtgactgagccccggagaccgaccatctacattgtgggaggctacgatggttgggatccggttgttccgatggacagttgggcacgaggcaaaaccgtttatgctggttgtattctatgtatgtatcaatgatcttataaatcatcttggtacggtagtgtgatt

SEQ ID NO: 26483 - DNA, 826 bp, Arabidopsis thaliana
tcccttctttgttgttatagctctttttgtgtgtaacacagcctgtaatgttgctagcaatttcttctgaaatatcaatggacataccacttatattgttctatacactattcatcttacaacttacaagctcagtttacaatcttggttttgattccctccaacttagctatgctgaattggtaaacccaagccaagacgttcttattatatgtaaccaggcgctaataagtgtttttagtagcatggtggaggactatatatattcactcggggttggtctcttgtgtccctggagccaaaccaagatccggaacggcttcacctgcaagtgaaagtaaccccaggttataaaaccttgagaagacactaaattccactaggagaatatgaaacggaagctataccatgcattcgtttgaggaatctctcaaactctttgaagttttgagactccatcagagttgggttaagcctcaggtaagtgaaacatgaaaggtggcgacatcaggatcggtaaggggctttgcgttttcaagtatcttgttgtaaccttctctgtcataacaaggaagagcattttcactagcaacaggtatactagcatcccaagcagcattcagcacctgaaaaaattaacaatggaacgaaaaatttgacaagttaagattttggcctaaacacattaaagccaatcacttgtataagttgaagaagttttgacctgccaaactagaccttctggatctgccagagcctctgggaaatcctcatgttgatcaagtgtccgtaactccacacatgtgaagttgagagcagcatcatg

SEQ ID NO: 26484 - DNA, 899 bp, Arabidopsis thaliana
tggaaggaagaactcgctctccataattctgaccgagtgttctgtaaatctcgggtaagcggtctcccataggacgtgtaagtaccctaagcccaatagtcacctgtgaacaacatcaaacaagcatcagaaacaaaatcagatagagttgcagcttaagcataccctcacaactacacaaacacacataccgtttgaagatcattacttccagtttggctattctcaacgtaaggtcgagaacgaacatcatagataattgctctttcaaacaatggtatcttaaaatgagtaccctctggataataaacaaaaaagtaatagaggtacagagtaatttaactcttataagaaaacaatacaaaccctatctttgataccggtaaaccggttaaacacgatggcacggtgtcctccatcgacattgtacatgctactaccaatgcaatagagtccaagtccaccaataacaccgagcttaagcaaggcagagagtgcaggtgatccaggaacgtttggaacttttttcacattcattttccttaaaagctatcgcggtgaatgtgtaagaggctattgggcctatcagtatatttttttcttgcataacacgtaaaaatctgattttttttttctttttctgtaaaaggttggaaaaatgcttaatctttgtctttattgattcaagaaagggataattaaactaaaaaagaaagaaattgaactgaattgtttttgctatatttcagacaaaatttacagctagatatattgttaaatttatataacttaattttgattgactaaaatgtcacactatatacgatatattggtaatggcctaaagggataattttgcagaatgtcagaggttatagataataaacgttcgcacgaga

SEQ ID NO: 26485 - DNA, 518 bp, Arabidopsis thaliana
cttatgttgatgtaatcagctagagattgaaaaatggcggacggtgaagatattcagccgctcgtttgcgataacgggactggaatggtcaaggtaatcaaaaagctttagagaaacaagatttgtgaatgttattatgtgccataagttaagcaattcaactatgtgcgtgtaggctggttttgcaggtgatgatgctcctagagctgtattcccaagtatcgttggccgtccacgtcacacgggagtgatggttggaatgggacaaaaggatgcatacgtcggagacgaggcacagtcgaaacgtggtatcttgactctcaagtatccaattgagcatggtattgtcaacaactgggatgatatggagaagatttggcatcacactttctacaatgagctgcgtgttgcccggaagagcatccggttttgctaaccgaagcgccgcttaatccgaagctaaccgtgagaagatgacacagatcatgtttgaacattcacactcctgctatgtatgt

SEQ ID NO: 26486 - DNA, 585 bp, Arabidopsis thaliana
gttgtaggtattgtgcttgactctgggagatcggtgtgagtcacacggtccctatctatgagggttacgctctcccgcatgcaatcctacgtcttgatcttgcaggtcgtgacctcacagatgctctgatgaagatcctcactgagcgtggttactctttcaccacaacagctgagcgtgaaattgtcagagacatcaaggagaagctttgctacattgctcttgactatgagcaggagcttgagacggctaaaaccagctcttctgtagagaagaactatgagttacctgatgggcaagtgatcaccattggatctgagcgtttccgttgccctgaggttctttaccagccatctatgatcggtatggagaatgctggtatccatgaaaccacctacaactccataatgaaatgtgatgttgacatcagaaaggacttgtatggtaacattgtgctcagtggtggaacaactatgtccctggaattgctgacagaatgagcaaagagatcactgctttggcacgagcagcatgaagatcaaagtcgttgccctcctgagaggaaatactctgctggattggagg

SEQ ID NO: 26487 - DNA, 532 bp, Arabidopsis thaliana
  unsure (1)..(532): unsure at all n locations
cagctcctccatcgaaaagaactatgaattacccgacggacaagtgatcacgatcggtgctgagagattcaggtgcccagaagtccttttccagccatcatttgttggaatggaagctgcagggatccacgagacaacttacaactcgatcatgaagtgtgatgttgatatcaggaaggacctttacggtaacattgtgctcagtggtggtacaactatgttctcaggtattgcagaccgtatgagcaaagagatcacagctcttgccccgagcagcatgaagattaaggtcgtggcaccacccgagaggaagtacagtgtctggattggtggttctatccttgcttccctcagcactttccagcaggtaaaattggactgtcatttctaagtttttgcttcttgtggttgattaaatgtagacaactcctctaatggtttacattttctgtgtgtgtgtgtgtgtgtaatcagatgtggatccntaaggcagagtatgatgaagcaggtccaggcattgccacagaaaatg

SEQ ID NO: 26488 - DNA, 581 bp, Arabidopsis thaliana
  unsure (1)..(581): unsure at all n locations
ctcaatagggtatttaagggtaagaataccacgcttggattgagcttcatcgccaacatatgcatccttctgtcccattccaaccatcactccagtgtggcgaggacggccaacaatacttggaaacacagccctcggtgcatcatccccagcaaaaccagcctaagtcaaacacacaacataatcaccttaactacattgttcatatgataaaaacatattgaaattttctaaggttcagattgatccccaaagattatatttgtaatccagtttgaaaacgttcgttagtagaaataccttaaccattccagttccattgtcacagacaaggggttgaatatcttcaccatcagccattttctactctctgcaaaaacatgagaccaatttggcaaaaaaacaagaataataaaaagacaaatcagtcaatgctatgtttcatatttatgctaaaacaaatgccggtaaggaatatatctaaacattataataaacagattcattttcaagggagtgaagaatattaatatccaaagagagacaanatcaaatccgaagaagaatgtgacatatatata

SEQ ID NO: 26489 - DNA, 552 bp, Arabidopsis thaliana
tgttaaaggcaggaattttttttcggattctgaagtcacttaatttgccttattcatatacattttcatgattcttgtaggcaggtgatttcaattatccacacacaaacctctcaaacgcttacgaacttggagataagctcaacagaggcaaagaaaaggtaactctatagtctttagaaaaaatgagagccaacttagcctttgtaattaaacagttgtctcgtcttaaacaggctgaagcttcatgtcgagctaatcctcaaatgcatccggtcgttaccatccgacaatgccaatcaatcagacatcccaaactggggacaactagatgaattctttgcagagcactttagagaagaagaagcaggcgaacgtgagtgatgaagtcgtcattgtacagcaatttgtttcttctcacatcctttataaagtcaaaaattcagagtttgggtttgaggatggactattcgcctgtagatttaacttacaggtaacaaattcattccctctgcctccattaccaaaaaaccactctgctaccaaaagtgt

SEQ ID NO: 26490 - DNA, 1521 bp, Arabidopsis thaliana
atagcatcaaatctaagattctgcttgaaagaaatgtaaaagaggtgcctaactacatattaaatttgaatttgttaatttggagaaacaaggatgcaagattctagaaagttatatataatttgaccattcgtcactaaccaaaacaattggctttgttgtttttatataccacacgaattacggcttaagcattggagattgaactcgttaactcaccgcccactattcccattgtcgccgctccggtaaccggtaccgcttcttctataccaagaagaacaataaaataaaagagattatgtggcttaagttagcttataacctaagtacctaactctaaaccgaactaattagttttcggcagattcgttgaatcatgtatgatatattgatacacatactttttttattaaaatgtatagagaatattggttcaaaattcatttgccgtgatcgaagaataatgcgattatcaaaataaaataaaataagaagcttcaaagcaaacgtacatggtagagttacaatttgattaattatgaaccgttattggccataaccaaacataaaaattaatgattttgaacccactagtttaggatgttatttggtaattcaaatttgatttatctattacagtttttaaatttatttttgttattacgtagttggcctgtggtggtggattgctccggataacatcactaacgcatatttataatcacacgattaaagagtgttttggtagttaatgcatgtaatagattatcttttctttttgtgcaacggtaatagattacctaaggaatatcacaatcgtattggacagatattggaaactaatcaaactcaaaattattatgttttatgacaacattatctctatagagaatccctgtgttgtcaaaaagaaaaacaattatgtattaggcccaaggaagagcagaactatctcatttctattgggctattaagataataggctgaaagagcgattttaggcccaaggagtcgtatttcaagaaatgacgaccgatgggactccaccgagacgaagcgacggccatggaaacccttttcagagtctcacttcgtctacttccggtttccgccgccgtgacatgtcgctcgatccgattccccgtttcaagacccggttcctcacacttactgaaccgtaagctgtataatttgcctacttcttcttcctcctctttgtcgacaaaagccggttggttattgggtcttggtgagaagaaaaagaaagtggatttaccggagatagtggcatctggtgacccggttctgcacgagaaggcccgagaagttgacccgggagaaatcgggtcggagcgtattcagaagataattgatgatatgattaaagttatgagattggctcctggagttggcctcgctgctcctcaaattggtgtcccttaagggtaagtctataaatgcttatcctagttcacccatttcgaagcaaatgattgaattagtgtttcatggtgaatg

SEQ ID NO: 26491 - DNA, 2445 bp, Arabidopsis thaliana
tgttcttgtcagagcttgtggagtgttgtagagagttggaggaagggcaccgagcttggcagaccataagaaagaggctgcatggaggctaagaaggctggagctgcagctagagtcagagaagacgtgtagacaaagggagaagatggaggagattgaggcaaagatgaaagctcttagggaagagcagaagaacgcaatggagaagatcgaaggagagtacagagaacagctcgttggtttgaggcgagacgcagaggccaaagaccagaaactggctgatcaatggacctctaggcatatcagactcaccaagtttcttgaacaacaaatgggttgcagattagaccgcccctgaaccgtctcctaaactctttgttgtaacttgtaatgtaatgtaaggttttttttttgtttttttttgtttttttttgtctttgatcatttgggtgtctccaatgtttacttagacttttgggttccttacctcagctttgtatttgtttcttttacctttgtgttccatttatcacttcagtttatccatggctttgttttctcaagcttgatgttgatttagtcagctgcaacactttggtttataaataaaatcgatttatatctttacatgtgtaaattcaagtagaagacagaaaacaaattgttacataataattgaaaaattgaagaggaagaggtgtgtacttattcactcaaaaacacagttgcattagattttaaaccatactacaaacagattaccataaatccatgaaaatgtatttggcatgaatttcaaaacataagagaacaaaaacaaagagcagaataacggaagattaaaaacccggcttgagacatggtcggacaaaccctggcggtgcttctcctctgacacatgatcaactttgaactcagaagcacttcctgtgaacaatcgatggacctgactcgtcatactctgcctttgcgatccacatctgcacaaggtaacacatagtttcagaattgaaccagtttagttaagctgagagtgattaggatttagtttaggtctgtttagagtaaacaagtgatgggactgtgtgtacctgctggaaggtactgagggaggccaagatggaccctccaatccagacagagtatttcctctctggaggggcaacgactttgatcttcatgctgcttggagccaaagcagtgatctctttgctcattctgtcggcgattccagggaacattgtggttccaccactgagcacaatgttaccgtacaagtccttcctgatgtcgacatcacacttcattatggagttataggtggtttcatggataccagcattctccataccaatcatagatggctggtaaagaacctcaggacaacggaatcgctctgatccaatggtgatcacttgcccatcaggtagctcgtagttcttctcaacagatgagctggttttggctgtctcgagttcctgctcgtagtcaagagcaatgtagcaaagcttctcctttatgtctctgacaatttcacgctctgctgtggtggtgaaagagtaaccacgctcggttaggatcttcatcagcgcatccgtgaggtcacgaccagcaagatcaagacgtaggatagcatgtggaagtgcatacccctcatagataggaacagtgtggctcacaccatctccagagtcgagcacaatacctgcacatccacaattcaagaaaggctttacgttttggctctgcaaaaatgtacaaagatcgaagctttacaccataaggacacaaaagcgctacactcaccggtagtacgaccactggcataaagagaaagaacagcctgaatagccacatacatagcaggggcattgaaagtctcaaacatgatttgagtcatcttctcacgattagctttcgggttaagcggtgcctcggtaagtagaataggatgttcctcaggagcaacacggagctcattgtagaaagtgtgatgccaaatcttctccatgtcatcccaattgttgacaattccatgctcaatagggtacttgagagttaaaatacctcgtttggattgagcttcatcgccaacataagcatccttttgccccatcccaaccatcacaccggtgtgacgaggacgacccacaatactaggaaacacagctctaggtgcatcatccccagcaaaaccagcctattccaatacaaaagaacatcatcatcttaaacaaaaaaaaacaaatgctacattgttcagaggatcatcaatcaaaaattgaaaaaaagatgaaaacttttgtcaaaaaaaacagagagaaagaatgacacaccttaaccattccagttccattgtcgcaaacaagaggttgaatgtcttcaccatcagccattttcttctacctttatgcaaaaccaaacattgtttaaagatcaaaggga

SEQ ID NO: 26492 - DNA, 1418 bp, Arabidopsis thaliana
acctacaccatttttttaatcactactacccattgcattgaacaaacttccaagttcttcttagcttcagattaagaaagtaccctttcttggctttgttgatgtggtaccattgtccattgtcttgtgtgtttccaggtattgtgttggactctggagatggtgtgagtcacactgttccaatttatgaaggatatgctcttccacatgctattctgcgtttggaccttgcaggccgtgaccttactgattacctcatgaagatcttaaccgagcgtggttactcattcactacctcagcagagcgtgaaatcgtaagggatgtgaaagagaaacttgcttacatagcacttgactacgagcaagagatggaaacagcaaacacaagctcatccgttgagaagagctatgagttgcctgatggacaggtgatcaccattggaggagagagattccgctgcccggaggttctgttccaaccgtctttggtgggaatggaagctgctggtattcacgagaccacttacaattccatcatgaagtgtgatgtggatatcaggaaggatctgtacggtaacattgtgctcagtggtggaaccactatgttctcaggtatcgctgaccgtatgagcaaagaaatcacagcacttgcaccaagcagcatgaagattaaggtcgttgcaccacctgaaaggaagtacagtgtctggatcggtggttccattcttgcttccctcagcacattccagcaggtaaaacttgatcagattttgtttcgaattctcttacatgcaaattgacatcaaaggctgattatttatgtatatgttggttacagatgtggatctccaaggccgagtatgatgaggcaggtccaggaatcgttcacagaaaatgtttctaagctctcaagatcaaaggcttaaaaagctggggttttatgaatgggatcaaagtttctttttttcttttatatttgcttctccatttgcttgtttcatttccctttttgttttcgtttctatgatgcacttgtgtgtgacaaactctctgggtttttacttacgtctgcgtttcaaaaaaaaaaaccgctttcgttttgcgttttagtcccattgttttgtagctctgagtgatcgaattgatgcctctttattccttttgttccctataatttctttcaaaactcagaagaaaaaccttgaaactctttgcaatgttaatataagtattgtataagatttttattgatttggttattagtcttacttttgctacctccatcttcacttggaactgatattctgaatagttaaagcgttacatgtcttccattcacaaatgaacttaaactagcacaaagtcagatattttaagatcgcaccattttatataaccccaatcgcaaatgcctcgtc

SEQ ID NO: 26493 - DNA, 771 bp, Arabidopsis thaliana
cttagagatgagataagaagatggcttgtaaggtgaaggtttacggtaatgaactgattggtacctactaaggcaagaatcttcatcaaaaccagaagcaagtagccctccgagaagcttatcagaatctacaaaacaaaacagaatcagaacaaaatctaaaacaactcggaaaaaacgaatgtaacagtctaagctgagaccaaaacaaaagagcactttttcaccaaaacaacatcaaaccaaaaatagtagtcttgtgactgacaaagactcaatttttatgagtatagatctcaaattgaaatcgaccaagagctatggacatacagaggcaaatgcgtagtgtaaagaacgagatctaaagtaataaagctcaaaactttgacttggaagaacacatactgatgttagtaacatttgggaaaactccggcgtcgagaactctagcttcggcgaaacccataatccgatttgaatcagatgggtgttggtgaaagatcattgagaatgctactagtacagagaagactatcaagcaagtagtgaaggttctcgtgagcttcatcgtaccggagctgagatacttcatttgaagtagttcggagaaattaacggactttgaaccgccggtagtggttctgatcggagacgatcttctcctgtacgaattctgatccactgattgctcttgagggagactctaaagtcactcaccgacttcataactttatttcagaacatgtctccacgacatggtttaattgtaat

SEQ ID NO: 26494 - DNA, 411 bp, Arabidopsis thaliana
aactttcagtgcattagtgtaaaaaaaaaaactgtctactctaaccaaaacatcgcctgaactgaacctaaagaatgtctgaatgacactatgaaatctagtttacaaatttctattgattctagtacatttggatcaaagtaacatttcccagatgagtaacatgtattagtgatgacaataacatcctgacacggagcttaacataccttcatagagcctcccatgtacaaatcttctagagttgcctcaagttccacaattacgtcatcccccttgacaaccttctcttcttcctccatcgaacctccaccaaaaaacctattaaacacatcaataatctctgcaaattagcaatctgcaccctttaaacacaaatgtaaaacattatccaaatttaggaactattca

SEQ ID NO: 26495 - DNA, 476 bp, Arabidopsis thaliana columbia
ttacctcgcaacttcggcacgccttttggcctgctctgctatttcagagagctcgttcttattgtcgttgaacattgcttctggaggtggtagaccatggagtgtacgttgagctagtgcccactgagcctccctctctccttttccataatctttcttagttgtgaacgcagtctgcaaaagattaaagagctatgaagctcacaactaacatggatttaaggtaaagttttgtttccgaaatatgctcactttctggttgatcatgttatcccaagccttgccagtgagagcgtaacggatgatgaacttgagaatatcaacaggaatgtaggtaatgatactgtatagccatatacctcctagccatctccatccacgaccgacgattcttgcgaatccccagtttgcatacacagcgatcaatgtagcaccttgtttgttgcataaaacgacacatgtatcagacggtaatg

SEQ ID NO: 26496 - DNA, 992 bp, Arabidopsis thaliana
gtagctgcccatgtagatctccaaccacaacgacctctgctttctcactgtctatcctaacgcagtttggctcttttttcaggattttggaagcaaagagaaccagctcatccaagacattaaaaggcagaacacttgaaaattcacaaggtgggagattcttagacgaccaatcaaacaccaacattacttcacaaacccagctgaaagtaagtttccctcccgacggccagaaaagaggtttctgggaaactgatgataaagactgctcacatcctatatcctgaacaggtggcatcagttccaacggttctgctgcaagaccatcatctatctccatgtcattcaatggtaagcataccatttctccacccatcggcttttggggtattattgtaggtgtaggttgaggtaacatcaaaaatggttctggagttggagcttgagcaacggagcctataacaaaggaatttcttaagttaaaagataagtctcgacaaaacttgaaagtttaagtcactaagaaaaggaattgtagcctaaaactattctgatggttcttatggaatcctaccattagataacgagcctaaaggcgcattgagttgaagggcgcctgcacacatatcaacgatatcttgtaatgtttgcctcgcggagccaacagtaagttcctcctcaagtgaagccctagatcgagcatgaatggctgcaaccctctgaacctgtaatttttatattgggtaatgagatttaagtaagctgaaaaaccatagaagttttgatgttggacataataacttacaagcacttggaaagcaaaaccagtgggtagaaattgtccggggcgcctctcgttcataggactaataattcttctagtaattctgcggtaccactccatataaggatcattatagtccattgggctacactctggctcaccggatacaacagatgacacacgtgcctcccacaatccaatatgtcga

SEQ ID NO: 26497 - DNA, 754 bp, Arabidopsis thaliana
tggtccctccaaaattatagtatgtatcttctaacaatcatataagataatagcaacacttgagaatccaaaaacacaaaaggtcagttcgatgtatatagtcaatcatctaaaaagcaatatagcttctaaatggttccctacagtatatagtttctattgtgtattcaacccagatcgatgtggatgacaatcgggtaatcgacgattccttcctctgacatgtaagttatatcctttagtcccccatacttcaaatctggagtcactctcacagattagctcctttccgatcacagaagagtatgttgaaaaatttacatcagttcttcgggatggcagttgcttctcgtctatgattactggtgaatatctcttagcaaattttgagaaaagtacagggtctttgatatttgaactgctaaaatctagcattttcttcaggagccagtagcagttggtgaccatgtggctactatccaaacaatttgagtctccatatacaccaacccgaccttcaccaatctccaaaagcccaagaacagcagggtcttcctgtaaacacagccacattatcacaaacaaatcactgcaatttaattaagaaaatccaaggcacagttagaagtggagagaactggtttctcattacctttgatgcctcagttagcagtagattttgggtagcgcactctcagagctgtctaataaaggaaaagtgtgcaaaaacccaccagcaggaaaccggactatg

SEQ ID NO: 26498 - DNA, 443 bp, Arabidopsis thaliana columbia
ggatcccctgaggaagtaatcgcagccatcatgcaagatgttgataccgacaaggtaaagctgtctgaatcttttcaaacgcgcgacattcttgacttctccactcattttgacatcttgtttcgtgtgatcaggatggacgaataagctatgaagagtttgttgcgatgatgaaagctgggacagattggagaaaagcgtcaagacagtattctcgggaaagattcaacagtttaagcctcaagttaatgagagatggttcattgcaattagaaggcgagacctaagaaagcaagagacaaaagtttgaatctttttgaaaaagcagcagcagaggaagaagaagaaagaaccgtcagatttgtcaaaaagaaataagtattatgttctataagcatttaacacggtaatgatagaaagattggtcgtggtcgtaggttttg

SEQ ID NO: 26499 - DNA, 709 bp, Arabidopsis thaliana
tgtttggaaccaaaagacaataagttagcagtcaaaaaagcagtaaatgtaattagaaagaagagacatggtaatataatagatattatggatggtgtgacgaataattgatctaataatcatttcagacaagtggacaaccctacctcctgagatgatctttttagcattctatgtatgtactggttaaaaaaaggtttcagaatcaaaatgatgatgatcgtatatttgaaaagaagccaatgatctctactttgaaagaagagaagatgaaaagaagccaattatgaagatgaagaaagggcataacagaagattgagtgttatcctttgttgaggagtgcccaacacaaattaaagaatgcttcttttcctttgttggatataatgtattcaaagacaattgaaaatccagacgagacgagtccacgaataatgtgggccttaaaaagagtcaggtaagggaaggcccaataacgaaaataatgggcttattattagcagcggcggtgagttattatatgtgtggaaagaagggccaaaatcacaactcacaacccccaaaacgcaaaaaacgcaaaatcgcagaaagaaactttgcaatcaaatctctctctcggatctctgagagagcgttctcgtaaatccctaactatagctactctcgtggatccacgaaaaccctagaaggaagagccctctcccgtcg

SEQ ID NO: 26500 - DNA, 1209 bp, Arabidopsis thaliana
acaagagcaataacttacagaaacagcctaagaatcttccctctagaagttggcaatacacataaatccgataagacagaagacactttattaatgagtggattctttaaactcttgaatctcgatcattgtccaaccaagagcctagacaaatacagaatgccccctaacgtattctcacagctcccctttaaaccttcaactctgaaactaaccatgagcttccctttaaaccttcaacgctcaaactaagcataaggactactgctgagatggcaaagctacaattcgctgctaaacccctaggctaggttcaatagttttgcagtgaacttaacaataatcacgagcgaaataagaaagatgaggtgcttacaacaggttgtgaaacacattggcttagctcactggattttgctaattcccggagagcaacctcggcagctgattgctctgcagccttacgattgaagaatccaggcaaagaattatatctgacaccatccagtatcacagtcgattgaaataaagatttgtgtgaagggccttctttaacgatctcataaacaggcgttgggagcttgtacttctgagcatactcctgcaaccgacttttgaaaacatagcaattggaaacacctgagcaggaaaaaaacttcaaaatgaggcaaaagataaaacagaaacagtgatgatgctatccactacagcataaattgcaaataaactcaaaacgacaacagggaacagcagtgaacgagttctgaataaagctgacgactttcacaaagaaactatacttatccaaaaggggagagacagttttaaaccaagcttctatgttccctaacaaattgagtcaataaatcatcatctcaaaagagtaaacttgccaattgccagagagatctacgcttaaacccacaagggacagatacacttgtaaattctaactaatcaaaacactgcaatccaatttccaagaagaaagaagtgagtaaagaacagaagaaaggggaaaaagcatgatctggtttcaaaattaaaacccggaaaaaacaacccatgaatgttgaattagagataatgcagacatgatggtgaagaagaagaagaagaagaagaagtaattccaccagaggagacagtcggtgcagatcttggtggtagtagcaaatattcaaatgagaactttgaaggcagattttt

SEQ ID NO: 26501 - DNA, 620 bp, Arabidopsis thaliana columbia
taattgtttttatttgttttttggaaaaggattaaaaaggtgtggaaagagctgtagattgagatggataaactatctaagatcagacctcaagcgtggaaacataactccagaagaagaagaactcgttgttaaattgcattccactttgggaaacaggtactctattattttactttattttccaaactctattttatttattatgtttttcattttttcccatttatattcgttcaatttgtttttatgcactgtatcgtataataatgatatcatgtcgaccaagtaagtggagattcggtattataagacggcttaattacgattattctctctcttaaatactataaactttagcgacgacatttttatggttggaaaatttaatttaaagtcgaaatggtaaaataaaaatactattttatcgtcgaatgagaaatagttatttcgttgtgggtctcctcttaaccattggggtgttagacttttctcttttagttgagacaaactaaattgtcctcatttttttacacttcgtatattcataagcattaataggacacagttgatatacacatgtgcactgtacacacacttcaacaaaatcagtccatatg

SEQ ID NO: 26502 - DNA, 1408 bp, Arabidopsis thaliana
catgactatatccactattctgatattcaaattcgatagagattaaattgaaacagtagattttttttatttcatatttttgtattaggaaatccgtcgatatctcttattgaatcttcttgtttctatatatttcataggaaatatattgcgttcctgcctagagaaagagagtatttttgcaaagtaataactaaaagggcgtttcaatattttttttgattcgagaacataacaagatcctacattctctttgtattaagaatcaatttgtattaaaaataaacaaaaatcgaatcataatcatggcttcagatatcaattaaatatttccatattgatgcatccgagatgacaatgtaatgtgatcgaaggtgtatgtgagaaagaaactctcatttacagtttcctataattttatttaaatattgaattaaatataaataagaaattttccccttttttgacagatacataagggcatgtacatatagatatcaaagaaaatagaaaaaaatattaaaagttccctttttgcttcaacccgtcaactaaaaaaagggtataaaaggaaaataacaatagttgatactatagtatttaatagacaagtatttaatacacgcaaaaaagaaaaaaaaaagttctttattctttatctgaataatgagtcatccgacaattcatgatttagattcaactacttatacttattaataaactaatagcaaggaagaaacaaattgagttgatccgtttacctaagtaaggaccaataaaatcaaaaattttgatcttcgaaaccaattaaatgaaattctaagggttccattttatggggcagtgcgcgagaaattaaatcataaacaaatgatagaatttgagcgccctgaaaatgccataatatataacatcaaaatctataacattaaggtgttcggaaatggttgaagtagatgaataggaggatcgctatgactatagcccttggtaaatttaccaaagacgaaaaagatttatttgatattatggatgactggttacggagggaccgcttcgtttttgtaggttggtctggtctattgctctttccttgtgcctatttcgctttagggggttggttcacaggtacaacctttgtaacttcatggtatactcatggattggccagttcctatttagaaggttgcaattttttaaccgctgcagtttctactcctgctaatagtttagcgcattctttgttgttactgtggggtcctgaagcacaaggagattttactcgttggtgtcaattaggtggtctatgggcttttgttgctctccacggcgctttcgcattaataggttttatgttacgtcaatttgaacttgctcgatctgttcaattgcgaccttataatgcaat

SEQ ID NO: 26503 - DNA, 603 bp, Arabidopsis thaliana
aatacagaaaacaaacaaaggtaaatcaagtttcaaaccagtcctccataagatcaaactgagttttgtttttacctcctcttgttcttgctacccaaaagcagagaaaagtagaacaagattcgaaagaagaagccccaagcgaccgtgacccacaagcaattccatttggtgagatccgtaacgccttgttgctgcaaaatgtcatatcctgtggtcaagcaagtagagcttgtgatcctcattccaagtgatttgctcatagttgctagaagcctaactttcatcccctgaggcaccgcgaccagaggtgtgttgtcgaatatctgaactcctctgacgaaacactttgttgggtcaccgaattcgtttaggagcacagcctcataaggatacttgactaaggaaatgtaatggaaccagatccagtagccagggattcgatctcggttgatgaagaatcactgaaaagcaagaaataggctaaaatggctacaacaatggtgtaaccgagcataacgtgtgggacacgcctgataagaaggtgacgaatgagcttcatgcccagaaagaggctaagattactaggaagtagaagaggaa

SEQ ID NO: 26504 - DNA, 569 bp, Arabidopsis thaliana columbia
taataacgtaatttttcccggaaaccaagccaacaagaagctcctgaatgttatgtgcggctgctagttctaaatgttgctcgtcatccaataatatcttaatagcaaaaactgctgcttcaactgctgcacttctttcagactgcataagtgttattaacggcttcatgcatccggaggcggatgcacttgttctgatgtttttattcgagaaaacaacagaacaaagtctggcagcatttatctttaactcctctgaagcagtagcagatgataagattttgatcacgttttccagcagacttccttccacatcaatcagaagagctgtattcgaagtatttcctgagcttagtttgatcaatgcagagagagctacctcttgctcactttctgatacagaaccgagtatgtccataagtggttgaacagcctggcaggcgatttcagaatttctgatgttttcagcatcaaatagttcattcagagccccagctgcgctgtatcttgcacttcgtgaacctagccgcagtactgcgataagctgattcaagggacttagtgccatt

SEQ ID NO: 26505 - DNA, 687 bp, Arabidopsis thaliana
gataaaatttagatactcaggaaaactcagttacaattaaggaacagaaaaattaatgcacacctatggaaaagggaaatgaaaacaagttctcagtggggaccatacctcttcttcggcatcaggtgcaataaaagcaagaggttcaatcagagccacttgcgttatggaggcaacttcatccatttcagtcaaaatcctacctagggaagaatcaggcttctgttttctatacatgtcaagcaacttaccccttggataacgaaacacaggggataaagcactaccagcaccaattaaggaagttgaagaacccctcccaatagtagatgcccttcctcggcccacagtgaaccctaaatttgggccctcggctcgtcctctatcaagtccaaacccaggtgcagcgcgataagaagaaggcccaccagactgggattccatcctatgacgtggcctccatttgtcacgagtgtcagagtcccgttcagaggttgcacggacattgctaaccacagattgactttcactctgaggctcttccttgtccttgttaatatctaccttctcacaacgagcttctttctctttgtcatcaggaccccaccgagatgaccatttgttgtcgcgccggggttcatgtacagcagcacgagaattaacatcattccacctatcagaagcagc

SEQ ID NO: 26506 - DNA, 448 bp, Arabidopsis thaliana columbia
cacctatggagccttgcgcaactcgtagataccatttacaaccactaccaccacgacatttcaacacgtataatccaggtgatgacttgattatagcagcctcaaaatagttcagaagctcagctttctcaactaaatcttgaacttcctgcttactctcaaactcttgacctaaactcaaaccaatcccatcttcccattcaacattcacaacctcctcatctacttgtacatcatcaacaaacatctcataattatccatatacgcaactccatcactcaaatcattctcaccattaaccaacaccgcatcattcgcaattccacttcttcgatcgtctcccgaaacttgctcaataacaacttccacatgcataacattcctccgctgattactatcaccttccattaaatatcctaaaacatcttcatcatccaaaatatacgt

SEQ ID NO: 26507 - DNA, 506 bp, Arabidopsis thaliana columbia
cgtttggtctctctaatgcgccaagacatttatgcgtgttatgaatcaagcttacgcccgttcattggtcgttttgtagttgtctttgatgatatattgaatttcagtttgtcccttgaagaccaccttagtcacttacgtgaggtactcttggtgctgcgacgagagaaattatttggggctgtgcagaagtgttcgtttggtgtggaggaagttctgtttttggcgaatatagtgtcgagacatggattgaaagtggactcggcaaaggtaagtaccatcgagtcttggccaactccacaatcaggtacaaatttttaccggcgttttgtctcgcattttagtagcatcatggcgcctattacaaattgtatgaaagctacaaagttttcatggacacaagaagttgattctgcatttcacatgattaagaaaaagttaacaacagctccggttctcgttcttccttgttttgacgttgcatttgaactccattgcgacgcttc

SEQ ID NO: 26508 - DNA, 1767 bp, Arabidopsis thaliana
tctttcgttctcggatgtgatctatctcctgaactaaaccgatgtactgagtcattaacataaatggaactcaaaccaggtatttttctgatgcctcgctttctcagacttccccttaacccatcagcaatgtcactccttccttctgcaacatacatgttggacataagtatttgatactctgtgttgcctggactcatctgaataagctctcttttaattcgttcggctatctccacctttccatggacactgcacgagcctagaagcgaaccgaggacaacttcattcggaggcactggcatttccctcatcaagatctctgcttcttcaataagaccagctcggcccaaaagatctaccatacatgcataatggtcaaccttaggttccaaaccatagaaccggaggctgtggaaacatcgccacccttcatctactatccccgagtggctgcaagcacttaagacagcagtgaaggttaagtcatctggcttcacctctcttatcatctgtgggaacatgtcaatcaccattctacctttcccgtgcattgctaacccgctgaacaaagcattccatgtcaccacattcctcttacgcatcaatctgaagacgttcatggaagaatctatgtttccgcatttagcatacatatcaaccaatgccgttcccaccatcacatcatcataacttgcttcctcccccatcatcatttccttcttcaatgcatacacatgaacccatcttccaactaccagatttcccgattgagcacaagccgatagcatcgagcaaagagtgacaaagttcaaaccatgcccacatctaaacaccatttctgccagaagctccaatacttcccttgtaaacccagctcccaaatacccagcaaccataaccgtccaagcaacagcatttctctcaggcatttcgtgaaaaacctctcttcctctctctaacccctcccatttcacaaccgtgtccaaaaccaccgtccatgaaacaacgctcttctcctctaactcctcgaaaatacgtttgacttcactcacaagcccacatttcccatacatatccatcaaggcattacaaacctttacactagtcaaaacccccatctttacagcaaccccatgtccttgttgagcgaaacccaaatcctccagcttggcacacacgccaaacaaacaaactacagaaacatcatcaatctctactcttttccttctcatttccacgaagagcttcatcgaattaaccaacaatccataccgagaaaaagaggataacaaagtggtccaatccacattgtctttttctgaaagaggaatttcgtcgaacagtttctgggcagtaaccatttcaccagaggaagcataaaactgaaatagcgcattgctaagatacgacctgggagctttcttcaatccagaagtggttaaaacggcgtgcaattccttgccgggacggagaaacgaacggtgagcgcaatgtcggagaaggagacgaactttttggtaggataagcatttcataagattaagctcgtccctttagtcctataactgatagaatcttagagctatggcgttagatctctgccttcgacggttctaacttctcgtgagttcaattttcccgggaaacaaacagaaaatctgggctcttaaatacacttcacgcgccttgatgagaaattagagcgcgtgggataatgtttttacttttgtcagtacacataagtgcataataaagtttggtttg

SEQ ID NO: 26509 - DNA, 403 bp, Arabidopsis thaliana columbia
tatgcacgacactaaaagaatgggatcagaacaaggcaaaatcacaatagtctcaaatgatttaaaacagatatactcaaacagtttaaaacacagtcttgttgtctattctaccgcttctcgccgcacaaacaagtagcagcttgaagagcgaagtacgtgaggatgatgtccgctccagctctgcgtaaacacatcagtgactccatcatcactttctcttcatcgatcattttcaggactccccctgctttgatcatcgagtactctccagaaacctgaaaattcataaagagtttgaaatcaacaaaaacatcctggggaatgttattcaataagttttaggagtagagtataaggagagtacttggtatgcagcaatcggtaatggagacttgtcctc

SEQ ID NO: 26510 - DNA, 961 bp, Arabidopsis thaliana
gtccctgtggaaggataatgtgcgtttatctaagaattttcaggatgaacgccatatcgatgtacatatatctattaataacataagtttctatttgtcttgcgtgtatggtcacccttctcaaagtgaaagacatcatctttggaaacactttgaaaatatttcacttacacgtaatgactcatgggttctcataggagacttcaatgagatattatcaaactctgaaaagataggcggaccaccaagagatgaatggactttcagagatttttgcaacatggtttcaatgtgtgatttggttgacattcgatcaagtggttacaagttctcttgggtgggagaacgacatactcatacagtaaaaagctgcttagatagagcattcatcaatactgaaggcgctgcctcttttccactctcggaattagagtttctggaatttactgcttcagatcataagcctttgttattaaccttaggaatttcagagccacctaagatgaaacctttccggtttgacaagcggctgattgagataccaaacttcaaacatcacgttaaagaaggttcgaatagagaaaagttgaagcgagatgttacaattatggatcaagtaagaacgtgtcgacaagccatgtcaagattaaaacataaaacaaatttgaatgcagaaacaagaatcaaacatctacaagcagtgctaaatagagctatatcaagcctcgtacattctgaacgacaattgattccacaaattcagagagatctaaccaaaacttacaaagatgaggagatttattggcagcagaaaagtcgcaatcaatggatgagagaaagagatcgtaagacagagttttttaacgcttgcgccaaaaccaggttctcaaaaaatagaataaactccattagtgatgaccatggtgaaatctatagaggagataaacaataggacgacatg

SEQ ID NO: 26511 - DNA, 502 bp, Arabidopsis thaliana columbia
aacggccgccagtgtgctctaaagatacttttcttcggcgacaagctgacgaaatgcatattcgcgctcagtggcccaacgtttgccgcttgattccggaagaccataaaaagcaaagcgcttaacgcctttctcttttaaatgcaaaaatgcgctttcaaccagcgcatagttatcggtggcaatgtaatgaacgggtgggtaactttctgcaaggtgatacgagccgccaaccccaacaatggggacgtcgacatcagccagcgcttgctcgatctgtttgtcgtcgaaatcggcaaatcgcaactatttaacgcgcgagaaaagtaccatcgattccagatgtcccgtgtgtgggaacatatccagcatcgccagtcgcgcaatggtatatcctgcttttaataacgcttcgctatcccgagccagcgttgcagggttacaggatacataaactatacgaataggttccagttttataatttgctgcataacacctgcg

SEQ ID NO: 26512 - DNA, 482 bp, Arabidopsis thaliana columbia
catcaaatatgcccacggagctttaaagcgatgacctttaactttggtgaactggccgagaaaatgtggttcagccgctgctgtgttttcggcaacctgccttataacatctccacgccgttgactgttccatctgtttagctatactgatgccattgccgacatgcactttatgttgcaaaaagaggtggtgaatcgtctggttgcaggaccgaacagcaaagcgtatggtcgattaagcgtcatggcgcaatactattgcaatgtgatcccggtactggaagtacgccgtcagcctttagaccaccacccaaagtggattccgccgtcgtgcgcctggttcctcatgcaacgatgcctcacccggttaaagatgttcgtgtgttgagccgcatcaccacgaagcctttaaccagcgtcgtaaaaccattcgtaacagcctcggcaaccgtgtttagcgtcgaggtgttaacgggaatggg

SEQ ID NO: 26513 - DNA, 523 bp, Arabidopsis thaliana columbia
ttttccagatgctgtgaaatatagatatgatataaaaggtcatcatcatagtctggaagaaactgcatcaaggataggtaagggagggagatgtaatacctcaggtcgggaaccaccatgcaagatcgttgctccttcactcttggccgttgagataaacttcaatatcttctcgtactgtaatatttacatttgtcagctcaatcagattatatgatcatagaagaaaagcacacctaccaagtaagaacatgataagcgtgatgaaatatcatatgctagatgtgatttgattgatgctctaaaagctaaacggttcagaattagagggacaaaagttaatcactatactacagaactcaattctcttttcctttttagtcctggttgttgtattgcaacctgatgggaaattgacaaataatatgaagacagaaaaaacgatcactgggattttacctgtcctttgctaactacaggaccaagcctgcatccttcttccatggggtctgaaattttaatg

SEQ ID NO: 26514 - DNA, 614 bp, Arabidopsis thaliana
tagccatgagattctcggcaagcaatatgttggcggatttggcgtctctgtgaatcacgggtttcgcgtcaccggtgtggagataatgcaatcctcttgctgatccaatgcatatctcaagacgttgcttccaactcaagctaagaagacctgaaccgtaaaggtgactcttcaatgttccattctccatatattcgtaaaccagaatcatctcgttattctcgtcgcagtatccgatcaaagaaaccaaatggcgatgacggaattgtgacaacatttcgatttctgtcctgaactctgcaagtccttgctgagacttaggattcgctcttttaacagctacttttgtaccgtcgtgaagctctcctttgtacactttaccaaaaccaccaactccaattgctcgattctcatcaaagctatttgtggcctctttaactgctaccaaaggaattcgataactggaattggaagctatacttgcaagtgtagttccatttgaggatgaagttgttccattggatgacaaaggaatccaagtctttgaattaccatcttggtctcgtcctcgtttcttgtacagcacaaagaaacctcctaaaaccactaaagca

SEQ ID NO: 26515 - DNA, 620 bp, Arabidopsis thaliana columbia
gacaggctatgatcccggtttatctgctacattgccaaattatgaagacgtggccttatttttgcgggttgatcttaagaaaggtttgtttaaatttgaccgcagctacagacccgtgcctctccatcagcagtatattggaatcagtgtgaagaaaccgttgcagaggttccagttgatgaatgatctttgttatcagaaagtattggctggtgctggaaagcaccaggtccttatttttgttcattcaaggaaagaaacatcaaaaacggctagagcaataagggacactgcaatggcgaacgataccctcagcagattcttgaaggaagatagtgtaactcgtgacgttctccatagtcatgaagacattgttaagaatagtgacctaaaagatattctgccttacggttttgcaattcatcatgctgggttatcaaggggtgatcgtgagattgttgagactcttttttctcaggggcatgtgcaagtcttggtttcacagcaactctcgcatggggtgtgaatctgcctgcacataccgtaattataaaaggaacccaggtgtataacctgaaaaaggggcgtggatggagctgagtcgtctagatgttatgcag

SEQ ID NO: 26516 - DNA, 479 bp, Arabidopsis thaliana columbia
ccagacccccaccttttatgtattcacacatcacattctacatcatcaccacagtgtttcagacttagaaccatagatgacatagaaaacagagcttaagttctcgagttccaaaagacaacatggttgagaaaaccgcacctctccttttaaaacttgcaaaacatgctagacgaacgagccaaccgaattgttagaccaccaccttgaatactagtctcagccttgaccatattccgttcatagggtttcctgcagcctggacaacgcccatctccatcgcaaatggtcttgtggcagaacagacagagccgaaatccacaaggacaggggaggaaattcgaatccgtcaagtccaagtcttcgtagcatatgggacatgaagacggaatcgccacagagctaaaacgcttgtctaactccggaaaactaagctgcttcgccaaattaggtaaccctgtgggcgaaggtcatcatct

SEQ ID NO: 26517 - DNA, 703 bp, Arabidopsis thaliana
tcggacccggtcgatgcattctatcagtaacattaaaaatctaaagaagattggcaagacgcagactcgaaatcttcttgaatgtgtgattctgtattggttgattgtgaaaactgaggagaatgagttattgcaggtgcacttgatagagggaatactagatcaggtgaatggaacagtttacgtctcatgggcgcaaccgagggtgttaggaataccgcagatcaagtcattgagggatcagctagacagctgggtcgataaggttcacaccacattgttatctgttgaggccgagacacctgatcttgttgcagcttaaactcttctttcctcttttttccttcactgttcgtttaagctacagattgtaacattctctgaggattaaatgcaacttccttttaagtttttaggtattacagttatacttttgaactttgttctccacagacacatgaatctatcctattaagttgagtttcatcgttagtgttgcctttaaggcttaagcctatttgcataacaaatggtccaacttttgttattagacgtgtgaaaaactcataaatctcaaatagtggaatgaatccaaattgtcaacttctgaaatgaaaagtgtaagggtaaaatagtcaaaacatattaaccccaattatcacatcgtttcgtttcaatcaaattttccgattttgagattttg

SEQ ID NO: 26518 - DNA, 436 bp, Arabidopsis thaliana columbia
taacgtccgccagtgtgcttgatgtgctctaaaggaaaggtgatgtcttcatcagcagcatgagctatggcgctactgacacaaagcagggttaagaaagtctttctcattgatagtccaccaccatggtcaaactggcgttaaactcgcccgcagcaagttgcgccccgcttgccttcacaggtacagccttcaactgtggctggttattgatattaaatggcgtccagctattttcaccgacggcaaacaatgagttatcggcgctattttctatccgaatgcccagcccggtgatattggtactgagtaccgtttcgccgttaatcgttgaggtattgcccttaagttgcatccgcaagtcgttagcaagactgtttgtgcagttcaacgtgtatttcgcatcttgccgataattggtgccatcaacgttatc

SEQ ID NO: 26519 - DNA, 543 bp, Arabidopsis thaliana columbia
tgcattttgcatactcattatgttcggtttttcatcttgcaggaaaatcaagagctgttactaaaatctatttcggaagatataggattttctgaaggcaagcctgttgctgcctgtctgatatacaagtgtctgatacactggagatcttttgaagtagaaagaaccagtatatttaatcgtataatcgagacaatagcatctgccattgaggtagttttgatgttctttcataccaacacaaatgttctttcctgctccatgggtagtctcatgctaaatttacatctttgcagatgcaggaaaacagcgatgtactatgctattggttatcaattccgccacattattaatgtttcttcaacgcactctgaaagccggtgctacaggaagcataactactcccagacgtcggggaatgccttcatctttgtttggacgggtatctcaggtagttagaagtgtttacgtgtctctcaagaatgctttgattccattaatctcacttttctcatgaaattacttgtataatagagttccgag

SEQ ID NO: 26520 - DNA, 1159 bp, Arabidopsis thaliana
ggaaaatattcatactgaaaatgtcgtaattaattagtgtaatttacccggtgaggtttacagggaagatcccaccacttttgtcccctgccgtcgataactccttcgcctttcaaagccattccgttgactctatagaacacaagccattgtctcttacttatattgctcggccacgactctggtccatcgggtgttacaatggtcccatccacctagcaataataataataaaaaatcaaatttacaaacaaaaaatttgacccaattatctaaatgttgaaaattaagcttttgaatttttatttagtagagaactattacttggaaaaattggtaggagcggcaaggaccagtgaaaatggttgattgaatcatgaatgtatagccgtaaggaacaagcaacactgaatcggtgttgttctcgttgttacaagatgagtcccacgccgttttgaatgcttcagtgtcgtcggtttcaccgtctcccaccgcaccatactttctaacgttgtagattccgttgttgtcatctgcaggatcgtcagaaggtgagggtggcagtgacggtgccggtgagtcagggggacccggaggaggagtaggaggctgagagatggaggaagatggtggctttggtttagaggagtggtggttatggttattatgtttgtgtttctctttgtggtgatggtttcgagcttcgcttagagacattaatgtgagaataagtgtcatgaaaccgaggacttggttgcgattataagtagaagttaacatttttcttggcttaaaaatgtctttttttggtggtgattttgaggtgagtgtttggagaaaaaagtgtgtaagaatagaagtcgcactcactaagttaagaaagcttcttggaaatgttaatgcagcaaaagcagacaagtctggttcctttatatatactgcaaggtcgtgggcttataggaagtggaaaccgattccgaaatgttgttttcattttattttttcaaaatatcaatttttaacaagtggtgtattgataaagcttccagggttttttgggggtttattgattatgactgttactatggttgtgacttactgtaaaattgcatattttattattttttattgtgaggagaaaaaagtcacctttgtgatg

SEQ ID NO: 26521 - DNA, 600 bp, Arabidopsis thaliana columbia
cgagaccattctcttgtttctctcggttaccgttttattagatagtgaaattgacaaacttgggattccgaattttgttgaacagaaatgtgggagaatagaagagcaagttgagttattgaagcaaaagctttggatgatatatcaaggagaagcattcaatggcaaaccaacaaagactgcgagatctcatggcaagaagtttcaggtcaccgtcgagaaggaaacctctaggatcttggtaagactaataatctcacgactagtctttagttgtgattagatttctcaagtctcttgatcagtgaactgatggaatttgaatgaatgtggtgttacaggggaacttgggatgggcttatatgcaactaatggactatacagcagctgaagctgtgtatcggaaagctcaattgatagagccagatgcaaacaaggcttgcaatttatgcacatgtctcatcaagcaagggaagcacgatgaggcgaggtcgattctctttcgtgatgtactaatggagaacaaagaagggtctggtgatccgaggttgatggctcgggttcaagagctattgagtgagctaaaccacaggaagaaga

SEQ ID NO: 26522 - DNA, 436 bp, Arabidopsis thaliana columbia
ctcgagggtcaggtttgaaaatcaaggaatgaatgcgcttgtgctgtctctacgtgcatcatgttcttgagggacttcctgcgtgttgttgttattaccctttccttgacctagccaagacattgtgagtcttgatgggaaaactttcttgcttgattcttgctttggtgccttcttcttctggtcattgactgcgtgcgagaagctcctgagttcgttaagccgcttcatcttttctttcttctgcttcttcttatggaaggagaggaagaataaagccaccactttggtgaccttgttccctgaagcagtagaagaagaagaagaggctttcttgagttttaaatgcaggttatggcgtcggggacagctcttggtgattctgatcaggagtttctacatggtctgagaatgttgtggtttaaggtaactaacg

SEQ ID NO: 26523 - DNA, 516 bp, Arabidopsis thaliana columbia
gaatgaaggaggcagacattgagaagacggcttttcgaactggcactttgaattcttggttatgccatttggtttgtcgaatgcccagctaccttccagtctaacatgaatgattcatttcgaccattccttcgcaagtttgtgttggttttttttaatgacattctcatttacagtaaaagtgagcaagagcatgtggagcatttgaatttagtgctgcaggttctggaaaagcagcaattttatgctaataagaagaaatgcatgtttgctcaaccaactgtggaatacttggggcatatcatcttacaagaaggggtttttacagatccaagtaaaacatcagcgatgactaagtggattaccctaagtctgtgaaagaattaagagggtttttagtcctgactgggtattacagaagattcattaaaggatatggtatgcttgcaagacctttaacagatttactgaggaaagatagttttgaatggagtgaacggctcaatcagcttttga

SEQ ID NO: 26524 - DNA, 569 bp, Arabidopsis thaliana columbia
  unsure (1)..(569): unsure at all n locations
nnnnnnnnnnnnnnnnnnnnnctaaaggccaacgtgcagctcgtcggcggcaaaatcggtaatggcttttacagaggtttcgtcggcattaaagccctgaatcagcggcaccggactaatgatttttttgcccgctgcggcgagttttttcaggttatccagcactctggcggcgttaccgtcggtccactgtttaaacggcgcgtcggcaacgtgttttaaatcggcaagaaacagatcgatatagggcagagaaggggcgatatatttccacggcacatgcagacaggtttctaccgcagtatgaatgcctgcctcgtggctggcttgcagtagcgccatcgccatttccggctgcataaagggctcaccacccgaaagcgttaaaccgccgccgctgcgatcgtaaaacggtttatcgcgcagaacggtcgtcatgatctcctcaacgcttttcacttcaccacacacggttaatgcctgtgtcggacagcagtcggttaacgccgtcagatgctccggggttaacttttcccgatgaataagcaaaccattcagcgcgcgctcaa

SEQ ID NO: 26525 - DNA, 488 bp, Arabidopsis thaliana columbia
ggataagtggaggagttaatggagatatctaccgaaaacgagaggttacaggaggagattaaactttctggcgagctcaaagaggcaaagagtgcgatgcaagaaatttatgatgaagaaagttcatacaaaagcttgcgtgggttcactcactgtggaattagatggagtgcagagagaaaacagagaattgaagggaaaggagaaggagagacaagaagctgaagaaggagaatgggtagaagcgagtcgtaaagttgatgaaatcatgcgtgaagcagagaaaacaagaaaagaagcggaagagatgaggatgaacgtggatgaactcaggagagaagcagcagcaaaacatatggtaatgggtgaagcagtgaaacagctcgagatagttggaagagcggtggagaaagcgaaaacctcagagaaaagagctgtggaagacatgaaagtccttactgagaagaaagagagtctaacacatgatg

SEQ ID NO: 26526 - DNA, 594 bp, Arabidopsis thaliana columbia
ttttgggtttctacttcttggtcgagatctctctctgattttcgagattgggacaccagattttgccaaatttgagtgcttttcatattttggatatatattgcttgtagagattgaatccttagatgttggttggagttggatatactttaatgaactaacttttgggtactgatttatgtatttctatgctcaaatgccaaatcatctaaattcgtatttaaacctgcttagggacttgacaattctcatagcacaaactgttttttttatgaatgtgggttggtttcaggtagctgatgcggaattggtgaaatctgacaagtttccggtagtggtgagtacttggcctttccttgaagctgttagagctgcttggagagcagttgataatgggagctctgcagtggaagctgttgttgaaggttgttctgcttgtgaagaacttcgttgtgacggtacaggtcggctttttggtccgataatttgaattacttctttaatgtactacttctgaaagtgagagttttctttgttggtactgatagttgggccatgaggaagtcccgatgagaatggtgagaccatgattga

SEQ ID NO: 26527 - DNA, 641 bp, Arabidopsis thaliana columbia
tcgctgcaagaatttcacatcttcattttctctttaagagctgaaggtacggagatatcgttcatgtttccattaactaagtccagcaagaactctgctgggttcatggcgagtagaggagaacatcctatggaagagaaataagacattgcttctgatgctttcccaaagtaaagcaagcttcctctgctgagtacaacctacgcttgtcaaaatctgtgcaaagagcctactagacggttggtggattgttgttacaattgttttacccgcctgcatgccaacaagtaaaaatttagatatggtcaaatccataaagaaacatgatttggagctgtaaagagtggagttcttacctttgctatacaatgtagcatctgaacaatcttaagagcggtagtagagtccaaactagaggtgggttcatcaaggagaagaagtgaaggattagtcatgatttcattcccaatacaaacccttttcctctccccacctgagacaccgcgcacaaatgaccctccaatcattgtgtcttggcactaaaacaacaattatcacaatcttctaattaggttcgttcttaagacttagattgaccacagaggaagttctaagttgtagacggtagtatatagatgata

SEQ ID NO: 26528 - DNA, 470 bp, Arabidopsis thaliana columbia
taaacttgcaaaaaaacttctaaactcaaaatcatcctctgacactaacccctctcaaactttgtttctcaggttttgcaacttgtctcctccttacctgactactttccttggtcgtagtcgtagccatcggataatcttcactatccgattcttcgataatctttttcaatctttccactacaatttccatcgtaggtcgctctttatcgttctttttcaggcaaagatcagccaatttagccaaactcctagctccagcagctggataattgttgcgtaaccgagggtcaacgatcatgctgaaacgttgactatcagcaggatactctttgacccaatccaatagccttcgttcagccactggcttgtgcctctcaatggttctgcgtccgattatgatctcgtagagcacaacaccgaagctatagacgtcgctctttaaccgaagatgacctgtttgcacgtat

SEQ ID NO: 26529 - DNA, 633 bp, Arabidopsis thaliana columbia
tactgcttgcttgcatctaatccatttggtatctcaaaatactcactttgattggttgtttgtactttatatttcgtcaaaaaaaagtaattaaagaagttaagaactaaatgttggtacgtttgtgtttgaactttgaagcaaccgttatgcaagttttttatcaagctggtcgccaagctcccaatcgttatggatcccaaacgttgttttaaaacactgaagaacgaggttgttgctagaagaccaaagacatatgagagtaaaaaagcctttcatgaacatttcagggctttctttgatcaaattggtaacgaatccatgaaagcaaatccttcagtgtcaactattaatatttgaaacaaccaatggtaaaggaggactgaaaactggttggtattaaaaaagagacaagcttatgatgatatctgattcaatcggtaagcttcctgaaagagcatcctactgtgagcttggccttgcgtcctgtaggttggcacagaacgttctgacactttccgcataccacgactgtctgtgagtgactgaaaatagttgtgctgcagtaaaagaccaaagcccataataagttttaagtttcttaatttatcttatgtaccaggaaaatattga

SEQ ID NO: 26530 - DNA, 577 bp, Arabidopsis thaliana columbia
gtgttttttaggctcgtagcctttctgatttctatgaagcctgcaaaggattggaacttgcaaggaattttcaatttcctgttctaagagaggtactaactgtggacaactttgataaattaatttggcaaccgttgcttgtttctgttacttgatgcatttctttacatttgtttacttcagcctccacaatcttttctgacaacaatggaggagtatattaaagaagcaccgcgtgttgtcgatgtcccagcggaaccactggtatgtatgcatatttctcatattagtgatccaatattttttggcttctttttttctgtgtcttatgtgctaatgaagttttctacattcagcttctaacatataggccggatgatggactgactaccgaagatactgaaccgtcgcatgaagaacgtgaaatgttaccttcagatgatgtcgttgttgtatctgaagaaacagaaccttctcccccgcctcctccttcagccaacgctcagaacttcattgataccgatgatctatgggtgaaattttatatgacactttatgactttgattttaattttga

SEQ ID NO: 26531 - DNA, 584 bp, Arabidopsis thaliana columbia
ccagtgtgctctagtgatttgatttctgctacatttttgcgttgcagcttaatactgataactcgtctcatatcatatccttagatattaaaagatgtggaacacaatgctgctgatgtaatcatcgatgctggtggtacatggaaggttacaaaaaatactggcgagaccccggaacctgtgcgtgagatcattcatgatctagaagacccgatgagcttattaaactctggtcctgttgttttcgatcttacgggggatgatgatgctgaactggaagtttttggtgacaacaaggttgaggaccggaagccctgtatgtctgatgctcagggtcaatctaataataacaacacaaataaacatccttcaaacgatgattactcttcgatatttgatatctctgatgtgatcgcacttgacccggagattttatctgctttgggaaacactgcgccacaaccgcatcaagcttcgaatactggaactggtcaacaatattcaaacttatcccaaataccaatgtccatagatccaatgccggtacatgtaccattctcgcagacaccatctcgaagagatag

SEQ ID NO: 26532 - DNA, 424 bp, Arabidopsis thaliana
taataaaagaaattacaaaagaaatacatatatatatattatcacctgaacataaagaccaacaagcagagtagttgtgagtccagcaacagcaccaatactgattaagattgagacgaacttcataccctttgatgaaaaggcttcagctaaaggagcatcttcgctgaggaggctaaaagggaccatcccggtgagcaccaaacatacgccaatatacagcgagatacaaaccagaaggctccccataattccgattggcaaacgcgctgaacaagaattaaacagacataagagactttgtagatagtatgtacattcaacatatatataggcagacctgagagttcttcgattcttcagcagaattagcaactgcatcaaatccaacatatgaaaagaagacaacagtagctccagtgag

SEQ ID NO: 26533 - DNA, 534 bp, Arabidopsis thaliana columbia
gtcaattaatgtcgtatatgatgtaaactttcacctaataattgaacttttgataggctgaagaaaacagtatatagctaatgatcttgaaatggcaggctgcaattggatgcttagcttctactctggattcgtcagttaggaaaaagattctgatatccttgctaaataagtttgatcctgccggtgaaagcgagactgaggggcaggtcaatcaatcgaatgattctgtcgatgaagaataagaaaactgcagttccacaaagacacagttaaagaggtatagttctagtcgttctgttatatttacttctattatgacactcatcctcgtaaaatctcttgcctgacttgttaaatttcttgaatattattggatacggtaatagcatgagatccatatgtatatctagttatatctcctcttctcctatacctcgtatgacctttttcaatggcatttgcttgcaggagtgctgtgctggatcttgcatcatcatttgttgaaggagcaaggaagatcttaatgagttg

SEQ ID NO: 26534 - DNA, 442 bp, Arabidopsis thaliana columbia
ccacaatgtattaaattatataaagagacacttaaatcaaagttaaaactcctcatggtctcatggtctcatggtcatggagctccattgttggcgtaagtgttgacaagggcaagagcattactcgttagcctcttcacttcctcgagccgatcacaaacggtcgtcttaatcaatcctccttcgtccatatcttcaaatccatccgtacacgtgtcctcatccgtcaatgctgcactcatccacgtctgcacgttactcatctggaacctaaacgtttctaccgacctccgagctgccgtgccgcctcctctgccgttcatgtcgcgtagttgacggagagatcctctcatctcgtccaccgcgtcttcgacgttcgaaacgcagtctaggattacggcggaacgtgtttggtggccatcaccggagtatttagcggcag

SEQ ID NO: 26535 - DNA, 412 bp, Arabidopsis thaliana columbia
aattcagcataactcaaacacaattgtactcgcaaccaactctgactccgactagcatttgcattccacttttgcttctagatatgtccgtgctgttgttcccaggttccagagagttttgcctcattttagtttttttaatcttgtatgctacattgttatatatttaattatttatgtatctgtttgcatatattgaaacaggttcaagatgcctgaccattgcatgcccaaagatgctgcttatcaagtgatcaatgatgagttgatgcttgatggtaatcccaggcttaacctagcctcctttgtcaccacttggatggaacctgagtgtgacaaactcatcatggattctgtcaataagaactatgttgatatggatgaatatcctgtcaccactgagctccaggtt

SEQ ID NO: 26536 - DNA, 590 bp, Arabidopsis thaliana columbia
atccccgtttaatgacgtttttactccagggaaatttgataatatgtattacaagaatttgaagcacggttacgggttgctccagtccgatcacgcgattgcgtttgacaacaggacgcgctcgctggtggatctttacgcggaggacgaaacggcgttctttgacgcgtttgcgaaggctatggagaaagttagtgagaagaatgtgaagacggggaagcttggagaagtaagaaggcggtgtgatcaatacaatgactacaagggataaattaggattaccccttttaacacacattcaaaatttatttggtagtgactagtgaatttggtcttgtgatattgagttgctaatatattgaaattgaaaatgtagcaatcatgattcatgccttcgggtggaaaaaaaaaatctctcgtgaaattttttgtgccatcaatatgtgttatctaaatttttgcatgtgtcaaattgaataatctgttacaaaattggatatcacaaaatttccatacttgcgatccatttgtcatatgtgatctccgggtcaatagggccaatatgtttaagagacttttgcagatacaat

SEQ ID NO: 26537 - DNA, 330 bp, Arabidopsis thaliana columbia
taaaaaaacccactatacaggaaatgacagatggagcaagctttgttgtctatggaagccttacctctaggtatcagattcagaccaaaggatgaagaactcatcaatcaatacctaaggttaaaaatcaacggccgtgatatagaagataaagtcatcactgagatcgatgtttgccagtgggaccaatgggacttacctggttagtctcatattcatcatgatttcatttttgagaattgacaggaggcaacaatgagaatcttgaattgatattgagagtgctgatgataaaagaacttagggaaatgttagaatgtgtagggctat

SEQ ID NO: 26538 - DNA, 448 bp, Arabidopsis thaliana columbia
gattatgtcactcactatgctgatcatcggagtggcaccgattcctagacccactagcagaacaacttcaaacttcttgtagtcttgtgctggtgctccatatggaccatcaattaggattcttggaaagctaagggatcacaatttaaagaaaaaaatgacctagttagagactgcatatgtatagctagagtataactgaattatagttagttactgataatacttactcagggatgtaatcccagtgcttcgagtcggctctgttcagtctgtgttcatcaggagggcgtggcttgcacacctgtggttcagagggagttacatacttggaccaaaataatatcttgtgtttatagtctagagtggaaatggagtaaaatacctcagagaataatgatcttaattgcttagtccagtctcctaaaaccctgatgtggacactgag

SEQ ID NO: 26539 - DNA, 606 bp, Arabidopsis thaliana columbia
tgtcaccgtcggcgagttttcttctgctgagtgactcgtaaaccgcttttgttttctctgtcatctttaacggtagagctccgttacggaacagacggaatggtttagtgtgggtcgatgaaccggatctcggttgggcccaagcaaacccggcccgtttcttcttctttggaacccaacctttggtgaagagagcgagtgagacgcccaagagcttcgtgtcattgacgagaggcaaagcgacgccggttcttacagtccacgtggcggaataagaagcggccgtggtaagtccttcaagacacgtctgctcattagtcagcgccgcggaaagaagcgtttggatgtcgtcggctttgggaaacgacagcggtttgaaagaggtttttgctgacgtgtcgttaacggtttcgaacgacgttaagaggtaatccattgttagaccggcgagaaaacggcaatcttggagagctctgataacggcaggttgagataaatgagcgttgcgtttgatatatctatcgacggtgcgaataaattttcgcgattgcgatacgagtttgcggatagagaacagccgtattgttgacattgccttgctatgtg

SEQ ID NO: 26540 - DNA, 979 bp, Arabidopsis thaliana
gtgtcgtgttcgagctccgggcgctcgcaaagtcagatactgtggcccgagcctgcatagccgaggctggagccatacccaagctggttcgttatctagccacagagtgcccgagccttcagataaacgccgttacgacgatcctaaacctatccatcctggaacagaacaaaacgaggatcatggaaactgacggagctttaaacggcgtcatcgaggttcttcgttcgggtgccacgtgggaggctaaggctaacgcagccgcgacattgttcagtttggcgggcgtctcggcatacagaagaagactcgggagaaaagcacgtgtcgtaagcggattggttgacttggctaagcagggccccaccagctctaagagagacgcgctcgtggcgatcctaaacctggtggctgagagagagaacgtggggaggttcgttgaggctggggtaatgggagccgcaggagatgcattccaggagctaccggaggaagcggtggctgtcgtggaggcggtggtcaggaggggaggactcatggcggtttctgccgctttcagtttgattcgacttttgggggaggtgatgagagaaggagcggataccacaagggagagtgcggcggcaacgctggtcacgatgtgtcggaaaggagggtcggagctagtggcggagatggcggctattccagggatagagagggttatatgggagatgataggagctggaacggccaggggagggaggaaagcggcgtcattgatgagatatctaagacggtgggccgccggagatacccataacacggcggcggaaacgcagagcattgtagtgccaacgccaagtaggatttttagtccagttttatgatttttcatttttttgttttcccctcttcttcttgtgtaaagtttaaatgttttttttttctttcctgatgatttgaaaagaaattgattcttttacaaagtattaaaagc

SEQ ID NO: 26541 - DNA, 497 bp, Arabidopsis thaliana columbia
tatctagatcgactctttgtatatcatgcttggttatattcataacaatcattatttcaacttcatatttctgaataatagaccatatgaaaagctacttcaaataactccaaagcaaaccaataatagaaacattacttctgcctaattatggaaataataagcataaaagaggaataaaaaatcctttgtgtaaaacatttctcttctgtacacatttatgcttcaggaagaccaatcttctcacatccagcgatcaaaactttcagacttaagtccaatcttctccttagccacgcctgaacggaagcttcaatacaatcgggggaagcttacggtattcagttaggaccggccttgactcctgtattctatctagagtcttactctcagttcttgcttcattgagaagatagcgaggctttgtatcctctatttgatccaagggcttacttgttggtgcttccatataaaaatgtttctatcttctcttctgt

SEQ ID NO: 26542 - DNA, 511 bp, Arabidopsis thaliana columbia
gattttgttttgattaattattatttcattgaccattataaaagttgttactgatgataagatgtacaagtaaaaaatatcatgtaattaatatatatataaaggtaattaatatattttaaaaaacaatatttatgcaaagtatgatcgtaattttctttaataacattatgaaaactatcacatattcgttttcgttattatttttttcttaaattcccaatatttaatgataatagttttagttacttcttcccccaaatatttcttttctccactgtcatatacagacgcacatgaaactgaaatatgaattttctttttctttttggttttaacctaaatgggattagtgcaaaacatgaactttgctaatatatcttagttgatttttgaatatttaaggtcgtgagtattataggggaagcatcacaagacgaaggatgggtggtgtgtcgtattttcaagaagaagaatcttcacaaaaccctaaacagtcccgtcggaggag

SEQ ID NO: 26543 - DNA, 634 bp, Arabidopsis thaliana columbia
taacttgcggcttaagtaacaaaatggtttcgtgtgcaggcaaagtttcagggcgatggtagtcatgtagctgactctgttcttcagatattgagaatgtacagtgagggaaacaagtccaaaagtgaggcgttccaggaggtatggttcttggttgagtcactttgtgttttgctttcttagttctctggttttgatttgctttgttatcgtttgcaggtcgttccacttgttcaggatcatgaagatttagtcatggagcttataaaaattattttcagtgatccatagagtctagagataggcaaggacggtaccggaagactgtttataccttcagagacaaaaatatgagtagagcttctaatgagaagagagtgtttttagttttctttgtaaacatttgagtttagctttgattaacatgacattcacaaatatgctatgcttctatgctcaatgaattggtgtataagatactaaaagatagtgtatagtttcttttgtagagctttctttaatatcaaaatgttttttcacttaatattttctggttatctttggggtcatcttttaatagaactgagaggagaaccgcaaaacagagtcacgttgaacaatacagagaggacag

SEQ ID NO: 26544 - DNA, 419 bp, Arabidopsis thaliana columbia
gcctctttagcaacaggaacacacactaaaggtgtagctctaggcaaagatgatccagtcccttcatccatatccacacttcccttcactttcatctcaaaacactgtattattgcagctaaaattattggaacgaatctaaacaccattttctctccaggacaacttcttctcccagctccaaaagacatcatcttctcactcatgaccttccattcactcccttcaaatctctcaggcctaaactccaatggatcttcccattgatttgagtctctcccaatcgcccacacgttaactatcactcttgtgttagccgggattctgaatccagccaccgcgcattcttcatcagattctctcacgaatattggtcctccagggtgtaactcattgtctccttcaccactgcttgggtg

SEQ ID NO: 26545 - DNA, 802 bp, Arabidopsis thaliana
tacccgcaaatggaaaaactcgccttagcggtcatcatgtcggctcgaatattgtgaccatatttccagtcccacaccatcatgctaatgggatttatgccactccacgtcatcctacacagtctaaaccagtcgggccatttggctaaatcggcgatcaaactcagtgagtatgatatcgagtgtagaaacaaaacgttggcgaagtcccaggtcctagccgatttcaatgtcgaactacccacgaaagaagctcgaaaaaattggcttgacacgacatggctcctacatgtggacggctcattctccaaacaaggtttgggtgtgggcatccccctcacttcacccacaggcgaggttctcgaataatctttcaagctaaatttcgaagcaacaaacaatgtagccgagtacgaagcactcgtggccgggctgaagctagctcaagggttaaaaatcgccaagatcagggctttttgtgattcttcactcgtcgccaatcagttcaacggggagtacacggctcgggacgaaagaatgggggcttatctcactcacagccaagatctggcgaaacagttcgacgagttcgaactatcaaggattccccgaggcaaaaacaaatcggctgatgccctggctgctctggcctcgacgtctgacccgtacctgaggagagtcatccagtcaaattcatcgagaaacctagcatcgagcttgaaaaagaagagcacgccttctccgtgcagaataccacagattgcaaggatatttttgattcgaatgataactgatatttagg

SEQ ID NO: 26546 - DNA, 558 bp, Arabidopsis thaliana columbia
ccttatgatctgtgttccagagtttgtggattattacatcaaactatatgtttttagagttgtttgttttattaagaatgtatgatcttctgctttggatgtttgctcacatatggatatttctcttttgcaggtattctagtcgactgagtaaacaatcatgagaatcagaaaaggaagtagagttgaggtatttagcaacaaagaggcgccttatggtgcgtggcgatgtgctgagattgtctcgggtaatggacatacctacaatgttagattttactctttccaaattgaacacgaggaggcagttatggagaaagttccaaggaagataattaggccttgtcctccacttgtggatgttgagagatgggatactggtgaattggtggaagttcttgataatttttcctggaaagctgccacagttcgagaggagttatctggacattactatgtggttcgcttacttgggactccagaagaactcacatttcacaaagttaacctcagggcccgaaagtcgtggcaagatgagagatgggttgcaattggaaa

SEQ ID NO: 26547 - DNA, 914 bp, Arabidopsis thaliana
tgtaattagttaatagccaactcttgtaataaaagtaatcaagccttttcgtgtaaggaatcattcaacagagacgaaaatgtagtaattaattataaccattaagaggaagtcgggaaaccaaagaaatctaacattaagtctttgaagaacacaaagcataatcaagcatagagaacaacatggcaaaatcatcaaaatcagaatcactgatctccaggaagtgtcttgatgatgtcggaatcaccaggatcaacgatgctgaggcaagaaactcggaagtatttaccacaagcagtacccaaatcaacattgttgccattgtagcgatgaactccaactttagcaagcatcgcatagtattcaatctctgaccttctcaacggtgggcaattgctagatatcaatatcagcttacctaaaccccccaacaatatccaacaattattcaactaaattacgaggaagacgaacactataatcaatcgatgaagagggattttaaatttttacctttggagctgcgaagggatttgagaacagacttgtatccaagagtgtactttccactcttcatcacaagagctaatctgctgttgattccttcatgggacttcttcgccttcttctccgcaaccatttttcaccgccgggaagattcagatcgcaggtttacaagagagagttcttcttcgggttcgggcggcgcaaaatgatagtttatatagcgagtgccttagaacccttagggtttttttgttttcttgtcaggagacaggaggatataagaagcccaaaataaactcgacccaaggcccaaactaaaaggcctataacttcaggatttagggtatgaaaatttctaattacccttgaattttggcgggagtagttgggatgggaccaaaatttgg

SEQ ID NO: 26548 - DNA, 537 bp, Arabidopsis thaliana columbia
caatatggttttttttttcatcaaaaggagtgctctaaatactagtaattgtgtttccttatgctgtctttatttgtttgtccagccacttggtaacctgaagtggatgaatttaagtaactcgagaaacctaaaggagctacctgatctctcaacagctactaaacttcaagatttgaatctcactagatgctccagcttggtggagattcctttctctattggaaacaccactaatcttgagaaactgaatcttgtaatgtgcactagcttggtggagctgccctcctctataggaagccttcataaattgcgggagttgagattacgaggatgctcaaagctagaggttcttccaccaacatcagcttggaatctctcgataaccttgatatcactgattgctcactgttgaaaagttttcctgatatctccacaaacattaagcatctcagcctcgcgagaactgcaattaatgaagtgccgtcgaggatcaagtcatggtctcgtcttcgttactttgtagtgtcatcaatg

SEQ ID NO: 26549 - DNA, 514 bp, Arabidopsis thaliana columbia
tacgcctcatgtcatcaagggactacgtgtatgcgagacctacaaagattgcgactttggagcttcccacagcttcactttcttgtcatcgcctgatgtccccaaaaccatggcatgtctttcccctgagaaccaacaacaccacatgagattcagatcacatacaactttacatacaagaaagaatcagacaggcacataccaactgtaatagccttgggtgcccaagatatgcatgtgatatcccctgcacatacaaccaaccgtggtaaatttactatcacttgtttgaatagttttgaggtatatgttaaggttttgaataggttgcaaagagaaatgttgagagctatctatcaccttcgtgggctttctcagctgtgtccaagacatttccagtttcagcacataaccactgcaatgtggaaccatggcttgctgccaatatctttccctctgggcataagctgagacgatcatagtgcaacggattgcctcctgagtcgcaaagtgg

SEQ ID NO: 26550 - DNA, 724 bp, Arabidopsis thaliana
acattgaaatcaatatctttgttctaatgcatatatcgtgagatccataatcagcttacatgcagttctctcgtgcatttccattgaagaaatttcttcatcgaatcatgaatcaacgtgtaatgagcaccggaccggacaaataagatgtttacatctccttgtaaacgaagatctttcttttctttactatactggtcactttcttattgaaagacaattacactacattgatattgttaataaatcattagtaggatgtggatttatctgatggtacattgttaccaaaattcctgatcaatctgaccgtagggtcttttgaccagtcgctttgactttactctttggcgcctgatatccgaacacgtgttacgttagttagcaattgacgccgttagttgccatcgttaatgggctagcccaaatgattcatagtaatatcccaatatcttaattaagtctctttagcccatgaaggttcatatacagagtagtgtagaagcatttgcttcaaccgtcgataggttcaagtatcacaggtagatcgtactgaggttgaagagtgaggtgatccgccggcgcatgtttataatcggcggagagattgagccggaaccgttgaagaatcatggcgagaacggtcttggcttccattatcgcaaagttttggccaatgcaagctctttggcccattgaagacgcgaggagagcgttcggatga

SEQ ID NO: 26551 - DNA, 539 bp, Arabidopsis thaliana columbia
caatcatacagatacaagtgtgtgtactaagtgagcatcgaaggggtaaaaacaaatgagttagttgatgtgcaattttttagtcaagcatgaaaaacctagagaaccaatcacagacaacaacttatgaacacatatataactaagggatcgcagcaaacagcatatgaatgttaaaacacataactaagggaaaagaatctaaatttaagataaaaaggcaaaccttttctctgagaatacaaaggagggcctcccatacgctggacaaagaactcatactggttttggatggcatcttctttgttagagttagaaaatattgattgaaaccattcttcttcgtcatcatataccctaatacccatttcaaaaacaagaaattcattaagaacacaatgtccataagtagaagcattacccaaaatcttaaaacttgtctaggtaagaaggacttaagagacttgtcaaatcagaaactagtatatcttataacactttcatatctgcaattccaagccattatcataggaaaagtt

SEQ ID NO: 26552 - DNA, 525 bp, Arabidopsis thaliana columbia
ttctctgaaataagactctgaatcagattaaacggaaacagttaagaacagtaccgtggctgtggaaagattttgggtgagtgtttgagataaaaagggacgatttctttggcctcaaacaaagggcggttgctgttgcggctatggccaccgctttggtcttgtgcggtcaacatcgccactatcaaacctccggtgcttgttcctgagatgacatcgaaataatccacaagccttgcctcctcaccatccaattcctgtttagtagacatttacaaatataacaatcaaattaaactaatatacaatctacgtggaaataagatattcagtttcaaatttgtttttccattaaaaaaagtgtacatgaactagagtctctataagagtcagatgttaaaaaaaagaagaaaaaaaaaagaactagagtctctatttgtcaattacaacactgaatatactttttgaagatttgcataaaacttcaaaaaaagcaaaaactagcaatatactgattttgtgaca

SEQ ID NO: 26553 - DNA, 475 bp, Arabidopsis thaliana columbia
tgagacagctattgaaaatacaaaccttggtaagagattgttgaacctccttgactgcttcacctttctcgcatagctcagcgaattcgctgtgtttaactccagcttcctctgcccatttctctaatgctcctcgtgatggaacaacaagagctacacagtagctgttaattgggtcctgcgtggaccatgatgttatcaacgtaattgctcgaacccaaagctgcctccacctgtgaattgtgtgatccaggcaatgaaagagcatgatgagattttatcatataccaccatcctctatgtagaatttaagttctataggcaaacctttccaagggatacgtattccccatgttgaagtttaacaatatctttctttctatcgatgacttcgagacatccatcagggtggaatctccaatatctccggtgtaaaacaccttgtgccttctcatcgactgaaatcgtccatgga

SEQ ID NO: 26554 - DNA, 663 bp, Arabidopsis thaliana
gtttatttgatctagtatttcttgattttggtaggtttgcagcagcattaaacgatctggggcttgactgttgggttatgaacattgttcccgttagcggattcaacaccttgccagttatttatgaccgtggactacaaggggctatgcacgactggtacagactgataaccttctgctcttttgcttctaatcccacataactttaacttacacaagatcacatttaaagcttttttcacttacttcctctaggtgtgagccatttgacacctacccaagaacctatgatctgatacatgctgcatttctcttctctgttgagaaaaagaggtaaaaagatttaaacttcgattttctttttatcctgaatccaaaaataaaggtcaggaacttgattggggtaatgaattgtggaacataggtgcaacataacaaacattatgctggagatggaccggatgttgagaccaggaggacatgtttacataagggattcactgtctttgatggaccaacttcagcaagtggctaaagccatcggttggactgctggtgttcatgataccggggaaggacccacgcaagcgttaggattctcatctgcgataaacggatatgaggaaaagaaaaagagcagatacgaaatcgaatgtgatgata

SEQ ID NO: 26555 - DNA, 570 bp, Arabidopsis thaliana columbia
ccgtcaccggatttgtctcctcttcttctaggtatatagattttgctaattttcccgctattttccaactctagaagcttcttccagtaaatcacatctaatccttcatcatctacaataacagctttgagattcccgtcgattcttacaaaatcctccgggaagagaaatccccaaggagacggtggtggaggtaaatcggagccggagccgccgtatctctcatcttcttctctcttcccacctcgatctgagtgacgaccacggagtttttctttgatcttcctccgtgaactactaccgttcttacggaaaagaaacgacatcgcggcggttactttaccggagaatttatcggcgttgacggagataagagtcacgcggcgaaatcagaacgttctgatgtatttttgacaacgaagaagaaatgtgttgggaatgatttttgatgaacatgacaaccattaatgatttaacacattaatgatttggtttttatgtttcctctcttattttttggtaaagcacaaaaataaaaattaagcttttcttacatgagatatggccaat

SEQ ID NO: 26556 - DNA, 577 bp, Arabidopsis thaliana columbia
aaacaggtgtaaaaacccagcttgcttggattgatattgctggcaaatgctttttccctgacacttttgacaccctcgaaagggacggctgccatcatatccgtggggaagatccggaacaacatgatcaacgtgagatcaagctgcacattgaaattcatgtacatcgtggggagtcaccgaggctgaattccactgtggtcactgacgagtctggtgacaatatggatgattttcaagctgttcagagatcctcaaatgggccaaatgacgaggcatcaaaggatagctgcagccgtgagcttgatgatgctgttgagaaatgggacaaaacagaaactgatcggttctctggtgtcaagcctgctgaggaggagcttgatgaagatgctgtcaaacaaatgtttgctttgggtgctgtcactctagggcatgtagagtcgcttgatgtgtatcagttttcaagcgagattgcaaaggctcgtctatctcttttccagaagcaagctgacatcactatgtcacactgaggagatgcaacattagatatgcatgggttcgtgcgagaaggaagtgt

SEQ ID NO: 26557 - DNA, 609 bp, Arabidopsis thaliana columbia
caggaactgcctcaaaattctcaattctccagatttcagtccctctaataacaaaagttaaggttcacaagctcaaacagtccaaacattcaggaagaacataattcgattgctcatttgatatcaaacactaatgggaaagtagttatgtagctgacaggatacggtttctggccagctccttgaaatgcaggatccaacacttttgttgacattgtataacagtcaaatcctctttttctgtgtgtcagggaaaatttatgtactacaaacgccaatgaacctgttgagtcaaaaaaaaaaatacggaacaaagttaagacaatgagcagataatcaaccaaatcctcccatttacttggagatgaaggatctcaagcatttcttcttggactgtttctcaagcaaagcattggtcaattctgtaattataattcgagattcatctagaaaattttaaatccaatctcgaaagctagctagtgatcaagaaacaggaaaggtctacagagagtcagacacagacacgtaaaggattttggctcgatcaacctttagaaattagaaaacctcaaaactttgcgatttccaggaattgatcacatgtga

SEQ ID NO: 26558 - DNA, 488 bp, Arabidopsis thaliana
agatgcgttatgtctcgcaaaggaatttaacatgttgagttatgtgtttatccctatcaacgcacgttttctcggagtttcgatttattatccaaatttggacaaagatatcaaggaagagcacacagtgcaaagaaacccactcgctataccggggtgtgaatcgggttaggttcgaagatactctggatgcatatctggttcccgacgaaccggtgtaccgggattttgttcgtcatggtctggcttacccaaaagccgatggaattttggtaaatacatgggaagagatggtacccatatcattgaagtcccttctaaactcaatagctcttgggccgggttgcatcgtgtaccggtctatccaatcggtcccttatgcagaccgagacaatcattccgaatacgatcacccggttatgggttggtctaaacgcacttccgtacgagtcggttctctatatccccttcgggagtagtggttgtct

SEQ ID NO: 26559 - DNA, 626 bp, Arabidopsis thaliana columbia
ggcaaaagcaaacttcttgtaagcagatttgtagtcgacaaacttgtactatgccgacttgtactatgccgacttggagaatgttgttgtttgtgtggccttctttcaagagccgacttctcttgcttccttggttcgccaagtaacctcgctattcatgccatctcccaagtcaaagtgaggcaagtgagctgttgacttgattttgtctgagacctattgtgcgtgttggtttcttgtgagtttcggctggaaggagtagctgtctctgcgtgttgcaggtttgggctgccttgcgttgcagattcgatggcatgtccatgcatctccagttacgtcgaacttgtttgctatactactcgatgtttgggttctttgctgccttggtttacttccaccgaagctgttgctcttctttcatcagctaagtaaatgattttatggcttttgaagcttcaatttggtcgaggttttctgggattgtttcattgtgttttggtggtgttagtatgacttttggaggataagaagttgctttgtccatgctactgattggggatgtcggtagaggatagcattgcttgccacatttagcttctgttgctccgcacctttttaggtttggg

SEQ ID NO: 26560 - DNA, 542 bp, Arabidopsis thaliana columbia
gttccagagaagtaaatctggtcttgatcttgaggtgaaatcctgtcccagtgcttccccaattcgtaattccccagggtttgccgagatctacaaacgaacatagatacttgagttacaatgtatactttataactctgcagatgaaaaggtgtttttgcagttgagttacaattttagtagttgaaacccttatgggtgatgaaagtaagaagtggggaaagccattgaaacgtatatacagttttgcctcctaaaatgaaatgtaaatttggagttactgcaggaggaaatgaaactatccttggaaacacttgtctacaagtacaatagacgattcttttctttgtcatagttttgtgaaagacattgactttacgatatagaaatgagcaaaagagctttctgtttctatctcatatatatgtttatagtgttcttcattgtcgtgtatacacagcttaaaatgcagagtaatctcctttgtggcaaaatattgaagattgttatcttcagttgatatctgtgacccacccttgtta

SEQ ID NO: 26561 - DNA, 513 bp, Arabidopsis thaliana
gagctggttaagtgctctctaagaaactaccaaaatacacataaggatggttcagtgaccaaagatgacaagaacgatagccaaattcacatccttatcaaagagaagatgtatgagtctctctgttcagtttcaaacataaaacctaaattttgtaccaacagaacatgaaatgaatccaaagtattacatcatccaaaccctagatttcaatctatttagagctcaatatttcaagcaagccctagaaaccctagaaatcttcctcaatcaccaaaatcaaaacttaaaactcacaaaatcagacattctaaagagcaaaactttcgttacctgccgattcaaagtggtgggatcatgcttagaccagaacaaatcaagcagcgactggtaactacactcttttggatcatattgaacacgaacaatctcggcatgattcgtggtacctgaacaaacatctttgtaagaaggatcgtgagtgatccttgagaataccaacctctgtttgag

SEQ ID NO: 26562 - DNA, 552 bp, Arabidopsis thaliana columbia
tctctctctttctctggctcgggaagaagatgtcacgtagttgctcacagtgtggaaacaacggccacaactctcgcacatgtccgacggacataactaccaccggtgacaacaacgacaaaggcggcggggagaaagccatcatgctttttggcgtccgcgtcacggaagcttcatcatcttgttttagaaaaagtgttagtatgaacaatctctctcaattcgatcaaactcctgatcccaacccaaccgatgacggtggttacgcttcagacgacgtcgttcacgcctccggtagaaaccgtgaacgcaaacgaggttaataaaataacctttcttctctctttcccaaatctcatctctgtttttgtttcttgtttttgaaactttcttgcaaatttggaatttaggaactccatggacagaggaagaacatagattgtttcttactggattgcataaagttggaaaaggtgattggagaggaatctctagaaactttgttaaaactcgaacacctactcaggtagcgagtcatgctcagaaatattt

SEQ ID NO: 26563 - DNA, 577 bp, Arabidopsis thaliana columbia
  unsure (1)..(577): unsure at all n locations
tacacatgcaattcacttcgtagggcgttggggcagacattgccttctcttaactcttttgcggccggaacagctgcagcttaagacacgatagctctttagttgccgcaccctaatttagaaatatctcttgcgaaccttctttccgagcagagaaatggaagagagttcttgatcccaaagattctgaacgggataggatgtgacagagagagatagggacaggagaacgaacagagtgtgagggtgctagtacattgccagagggattggtgggacagagcggtagaanaaatcaactgtgatcagtttaattgagaggttctacgatccggaatcaggagaagttttaatagatggaattgacttaaagaaatttcaagtgaaatggatcagaagtaagattggtctcgtaagccaagaacctatactatttgctaccacaattagggagaacattgtttacggcaaaaaagatgcgtccgaccaagaaattagaaccgcacttaagctcgccaacgctagtaacttcatcgacaaacttccgcaggtagtcaaactttagttataccaagtt

SEQ ID NO: 26564 - DNA, 266 bp, Arabidopsis thaliana columbia
taaagcggaaaccgaggcgtgtttgagcgatttgttccagttaatattaaggttgcttgagtcattgtcaccgtcgtaactatatgctttatagccactgatgttgaaaccacccagaatggagttagaccagtttaaaccaagcgcataagtgcttttagtcggctcggtatcatcatcatccatcgcttcagacagttcgcgataatggcgatcagatcgagtgacgctggttgttagccaagtgaaaatcggagattgtagtt

SEQ ID NO: 26565 - DNA, 347 bp, Arabidopsis thaliana columbia
gtcactgaatcgtgtgagttgaagaatgcggttaagtttgttagcatcgttctcgtccttggtgaatactccagttgcacgcttaaggtcatcttgtacttggtcttccaactcaagttgattcattccctgaaagacacttatcgtcaggaatttcaactacagaccgaaataaacaaacataacaggccactatcaactatcgaactttctgtgagaatgcgagaaataaaattggatatgaacggtaagaatgaggagacaccaacgtaacagaactggacagattgaaaaggaagactcagatggaaggaaaaagccgatgtggctcagggaagctttggaag

SEQ ID NO: 26566 - DNA, 608 bp, Arabidopsis thaliana columbia
cgactctcccggattgacgagttaagttaagctcagtctgaacaaactcgatcttgcacttaagatcacagattgtcctgtaaacccctcctactggatctagggcacgagcattagcgtggtagataagattctccatagcgatgtctcgttgagattcttcgattctcttgagcatcttggtgatgttgcttactccaaacagtttatgagcgtttagaaacttatttgtgccatcttgtgggaaataacgagcgagaatacagtttttcttacacttttttctttggtgtttgcaggcagcgcaactgctggtggaacaccggagaaagtgcttaaggacattaggtttatgttttgggatatatggaagttttaggatttggcagagtttccttgtttttctccttaagagaaggtgcaagaagatcgtggagagagttcttccgagttgtgggtagagaaattttcagcaatggtatcttaagagaaattttggtagttaaatagagtactaacaatagcccttttctgatttcacaaatatatatctgtttgcaattatatttttatcagattttagttgatttttcctaatttttagatgt

SEQ ID NO: 26567 - DNA, 639 bp, Arabidopsis thaliana columbia
  unsure (1)..(639): unsure at all n locations
agataaatatttactatatatatgtatagagaactttttataaagaatgacttgattggtgttctaaagagatcgatgtagtgaagatgagtggcgaaggtaacttaggtaaggatcatgaagaagaaaacgaagcaccacttcctgggttcaggtttcatccgacggatgaagagcttttagggatactatcttcgaagaaaagtagagaacaaaaccatcaaactcgaacttatcaaacagatcgatatctataagtacgatccttgggatcttccaagtaagtcttcttaattattggatcatcccctctataaatatcagcatcgtatattatgatcaactcattacatatagttgtttttattgttttttctactgattttatcaagaaattagggacgtccactttgagatcttgttcgaatcaaaacgataaaaaaaaaatttgtattttgaatgcgataagttagtacatttccatatacttatgatatgggaccatccatccatacgaagatcaggtcaaataaaataaaatttagtatacttacacagaaatatcgcatagtgcgcctttatcatcatcgcatgaagatatagacacgaactatgtaatganagggtattttatttagt

SEQ ID NO: 26568 - DNA, 603 bp, Arabidopsis thaliana columbia
aaaaagattagacaagaacctgcgggccagcgccacttgtgactgtcttgagaacttcatacaaaacagaagcaattctgcgtgcgttaatcaacttctctcgctgactatcaagataaaaattccaaaggttagtgttagctcgctgaaattgaacttcaactagctacagtcattagatacctgttatccaaattgaaagctgcaccatgtctgataatatattccttgtaagcatgataaacacgtttgagttcccgaacatcactcttctcctttcttcttctcacagtgaactcttcatcctgcaaaagtaaagtgatgattttttagaaatttcatgacttattcaaaaactttctactcatctgtttgatgacttgccagttcaagcctttgaagaagagaagttttgaactgccgtacacctcttccggtagagtttctatccatgtggtgggctatctcgaaagcatgaaatcggcctgcagcgacagaatttcaacattggtactcaagtatgattctcaacaagaaagcttgaatttcgaagaaaaactcagtgaaatattgactacaaaattagggaagacgagagagtga

SEQ ID NO: 26569 - DNA, 568 bp, Arabidopsis thaliana columbia
cttctcgttgctgctgtatccatttttgtgtgtcatagaaagcttaagtttgacactgaactctgcaacaatgtctgtcaagtggctacaagaaggaggagaatatgaaaccggattgacttgccgaggaaagcctctagctgtatctctagataagcttctattctcaagtatgctctggaaacacaaaaacaacataggtttaggcttttagcaagacaacttttctttgtacccagtcaataaagcacagaacataagtagatcaacctgagcgttgagttcctcaagcacagttcctggaacaggatacgggcagaattcatcgggggtgaaattgcatactatcctttttatcaaactcaggccaattgatgggcagacctgtggaaacccaaaaaagtaaacaagaagctagatgaagaaaccaagcaatataagagatcacagctttgtagggttgataagcagttctaaatcatgaagcatacatacctcatctctggtggaactgtcccaaacatttcttttggaagcataaggagatcctcagttcattgagcaagtg

SEQ ID NO: 26570 - DNA, 593 bp, Arabidopsis thaliana columbia
gtctccgcactcctctatcgatcttttttagatccgaatatctcatctctctcttctttgctgcctctcttagagctgtttttatgagcttccttgcaatcccctgcatacccacatgttctcaatcaatctttctatctatttgcacataaaacgagagagagtaagaaagagcaagtggcaaatctacattgcgcgggcatgtgttcacaatgtcaacagcttcttgattggacaagtgctcccacaagccgtctgatgcaaatataagaaactgatcttctggatggattttgtgtactgtaattgccggctctgctctaaggatgggcttatggaaaacctcagggaccctgaactttgccaacaatggttcccggttgaattctgctttctttaagtatgcatcaccaatcgaccgtgaaaccttcaagaaccagccacgggttatatctagcgaaaaatcctcttcttatacatgcatagggcttacttagttgtatctttcacagtcaagctacttgcaagaaaagagtctagaagtcagcaactcgcattaccgtgaaagtatttttacctgtataatacctttg

SEQ ID NO: 26571 - DNA, 851 bp, Arabidopsis thaliana
tccactccactgtatttgtacctatgaagagctgctacaccatgagctcctatgtaacccattattgtctatcacactgattcaaacaaaacaacaaaaacaagatatcctcaattctaatcccacaatgacattaaagcatggatcttgagagcacttttcatattccctaatgctaaatcaataaaatgagcataacccgtcaacaaaaaaaaaaaactttgctcgaactgagacagtgactttcgagatttgggtagattctgaaatttagatcttttgctacaaattggatcaagagacgagtacttacgatggtccggtggcggtaaaatcagatacgagcctttctcgtctcgagtgtctgaaagaagaaagagacagtaacctctcacttgcccctatagagagcggcgaaacgggacgagaggaccagaagcaaaaggagagggctttgcgtttcttccgcgttccccacacgtgtgtgttaacgatttgtccttttctctgtttttttgattatttcaatttttacaaccaaccaaatatctttctttctacagccgacaacataatacaattatagtttcgagtctaaattgataggacatgtaaataacctactaatttgttagcatcactttccgaatttagaccccataatgcatattacaatttgaattttagttagaatgataatactaacacaccaattcaagtacaagtagtaactcttttttactatctttggtcaactaagttcactcctgcagattcaacagttttgttatctttccacaattatatatttcctccaacagattcaacaccacagacatgcatggatagaa

SEQ ID NO: 26572 - DNA, 570 bp, Arabidopsis thaliana
ttccacaacaacggagaagctacgacttacagtcttcttatggagtacgcgccgtacggaacgttgaccgacgtagcgaccaagaacggcggcttcattgacgaggctcgggtcgtgaagtacacgcgccagatacttcttgggttggagtacattcataactcaaagggaattgcgcattgcgacattaagggaagcaacgtgttggtcggagagaacggagaagccaagatcgctgatttcgggtgtgcgaaatgggttgaaccggaaataaccgaaccggttagaggaacgccggcgttcatggctccagaagcggcgcgtggagagagacaagggaaagagagtgatatatgggcggtgggttgtacggtgatagagatggttaccgggtctcagccgtggattggggcggattttaccgacccggtttcggttctttaccgggtcggatatttaggtgagttaccagagctgccttgctcgcttacggaacaagcaaaggattttttaggaaagtgtttgaaaaaagaagcgacggagagatggacagcgagtcaactactaaac

SEQ ID NO: 26573 - DNA, 799 bp, Arabidopsis thaliana
cacttgttgctcattcaccaccatcggtttcccattagccaacaaaggattcgaaccttgtctcttgatctctcccaagtaatctgagattcgtctctgtgcagcatcaaaagcttccaatgaatcttcttggctgtttccttcggatcttatgtcccatgatttcattgtgaccacgattacttctgcatgcattctgagatcgtagaggaacttcttcacgtcagctttgagtgcttccgcgtctgaatcctcttcagctatgcagaagagttggattttgcagctttcgaagctttcttttgtcagaagaagctgtgagagaagaagcatgagaccaccatctctcacaatccagtacaagtcgattgttccatactgtctttggtactcgtttggccactcgtctaaccctttgatgatgacaactgctttgtttgctgttatgcagtcattgattatcccaacaaatgtggatggaatctctgttagattttctctgcgccagatctcagggtacctcattaccacaatgttgggtttgaggtttccgagtcccatcgtctggatgatcccacggaacccttcagtcatgtttggggctacaacgatttcagctacaccttcacaacgcttatactcaatgtaggtggctaattgtttgcaagcttcctttgcttcttcagcacattcatagtagtcaccatctaaaattgagacaaagatcgacattccacgaccttttttcttcatacagttagcaaaatcagccagcttagggtgacatggaacattttcc

SEQ ID NO: 26574 - DNA, 1356 bp, Arabidopsis thaliana
tgtccatttcgatcaactgctatgatagctacggcgatgatctcataaccaaaatagacgcccttactcctccacaccagctccatgagctttctctacaattctatcctggaaagtcgagtccatcgtggttgagtcctcacaagcttccgatgttgaggtacatgtcaatatgttcaggtaatttggtgaaaatgcaggaaccattctggggaaacgagaatactcactggagaattgaaggtttaatgttaagttcattgtcggacctagacatggactgggaagtgctgcaacagtcaatgccgtacctgaggaccgtgaccgcaaactggtgtccagagctagagtctttcgcgattgaagatgttggctttagaggcggagtgtggatgaaaacaccattgcacagaacctgatgaaacgttttaagcaactagatcaatgtttattaaacagtgacaataagttggtgtattacatataccttgatacaatgtaatgttgctttgaccgtttggatttcatatcgcaattttcttttctaataatcatataacaaacgagcaaaaagggaaaacagagactagcagcaatggcagatctttgatgtcaactgcttgatcagtcagaatcagagtccagattctctgaagacctaacagacctccgtatgctctcttgatattcggcgtcttcatcatcttcctctttcttcttcttgctgagcattcctgttaaagatttgcactctttaagcaaaaattctctaactgggccgttataataaaaaaaaggtgggaccgaggttcttcataccctttttaagaagaacgttctctagtttattcgttgtgaaatcgtccttggttcccagatcctggaacccaactagcctatccatcgcaactcccttgctaagaatggtaaagaaactcgtactttatgagtatacacctaacaacaaaccctgtatgtaagaaggaatagaaagaggcgaaacctgaaaagcacaacgcaaggcaaagtctttattgcaagcttcgtgacaaagaaaggagcattctgcatttatttcagccaagcattagcttcagcaaaggattgttgaaaagccatttcctcttataaaactttcatcaaatggttcactaacctctgcgtccactttaatgaactttgtgtccacatgtctaggtgcaagagttttcagatgcttgtccataatcctacagtaatgcagtaaatatgtttggttatgagctcatatacatatcagaagacgaacaaaaaataagctgatgagagatcttacttgcaccggtaaaattccttatggtagaaatgacatatcac

SEQ ID NO: 26575 - DNA, 318 bp, Arabidopsis thaliana columbia
ccagagcccaaacctccatttcgcctacccgctgccccccctgcttggaacggcctctaaggggttgttgtgtaacaagtgcataatgtccactagaacgtccgtgtatttcatcattcacctgatgcggtgcttgtgagtggtaaagtggtcttgtgtttaagaggagccggttcaagaatcggtaaaggcatggaggtataacgagctggaggagccggtatgattctcggaaatatcgcagctaacggcaatgaagtgccttcagactctcattttgttccgactgccggggttacccaaccgtggccgataaaa

SEQ ID NO: 26576 - DNA, 542 bp, Arabidopsis thaliana
tggagacaaaagagaaaagggtttagaggactccaggttgcagcagaggaggattctcctaggtgaggcacaggaagatttctacaagacaagccagagacaagcagaggagaggctcgagagatctgtagtgcgagtacaagccatgttcaggtctaagaaggctcaacaggattacagaaggatgaaactcactcatgaagaagctcaggtgaatcatctgacatttttgaatctcagttttggaaaaaaaaactctaaccggagataagttcatacttgaattaacgagtcttgttatggtgtgacacagttggagtacggttgcctggaagatatttgatacatcaaaatggctatggagaggtgagtcaaagagagtttggtgttgattgttaaacatggatggtaattgatctgtaaattatgtgaatgggaaaggctactctcgatctttctgcaactggtttagaataaagtatacataacgagacctaatctctgttgtatgaagaagagagacagaattaacaaataggtat

SEQ ID NO: 26577 - DNA, 494 bp, Arabidopsis thaliana columbia
gatccagatgcaactcaaaaacaacacaaagtagtccaaatagaaattataccgaagtgattagcacagatcttcaaagttttagattgcctcataacgagacgaatcttcccagtgttcttatgctttaagaacttcacagtaccagctcctctctccttccactgattcgcatccttatcgaatcgataaagcttcgatttcctttagattcacaaacaaaaattcagtcaaacacaccaaaagctaaaccttataaattcgatcagatccagttgacctagatcagaaaaactataaacaccaattaagaaaaacacttacagatcaaggacggcatcttcgtcttcctcgccggtagtgacggcaacctcctcaagcctaacgatcggagcgacctgagctccggtgtcctcatcctagttagctccggcatcttcctcgtctctgtgctcgtgctcgggttcgttggtcgccatagtatttactgagat

SEQ ID NO: 26578 - DNA, 615 bp, Arabidopsis thaliana columbia
tcccacttctgtaaataatcttctcacatccccgcacgattattctctagccgatcaacgaacacagagacgctaatgtatttgactcgattcgaatcattagtcctctaatcacaccgattgatttccacccacagatttcttgtctgaaatttagggttagcgaaggtttggatcaatgatgcaaggtgaagtacaattgcagccaccggattcacagaaactaagtgattccgctccttttgttaaggagatcacaccaattcttcttcggcgtctccttctgctgcgtctgtggtggcaggaaatagcgatgagataaaggctgaagaagatttagagaacgatgcttcttcagctccttgttgtcgtatttgtttggaggacgatagtgaattgttaggcgatgaattgatttcaccttgtatgtgtaaaggcactcaacaattcgtgcatcgctcatgtctcgatcattggcgatcggttaaagaaggttttgctttctctcactgtactacttgcaaagcacagtttcatctgagagtcgaacctttgaggatacaattcgtggcgtagaaagcgtaatcagatctttgcgcaagagatgtcttttgg

SEQ ID NO: 26579 - DNA, 491 bp, Arabidopsis thaliana columbia
aagagagggtaaaggcaaagcacttcctgcgactggcgcacgcttgctttgccgcttgtaaggccagcgggatgtgacgtgccattttcgatgccagctgtaaggcgtattcgagggttaaatcgctggggaagacgtcgctaaccagcccggcctgctgtgcttgctgagcggtgatactttctccgctcagcaacaattttgctggctaacgatttaccgacactacggattaaacgttgcgttccgcctgcgccaggcatgatgccgagagtgatttccggcaacccaaaacgcgcgttctctccggcaaccaccacatcgcacaacaatgccagttcgcaacccgccccaagcgcgtaaccattgacggctgcgataagtggtttattaaaggcctgcaatcgcgcccatagctgcggacgtgtatcgtttaaggtggccgcgagatctttttctgccatttcgttgagatcggcccagcggcaaaa

SEQ ID NO: 26580 - DNA, 531 bp, Arabidopsis thaliana columbia
  unsure (1)..(531): unsure at all n locations
gtttcaacggtctgcttttctctgccgatcaaaaacgataatatctgagattttgtactttttaaacccagttagcttgtttaactgtacaacaatgtgataggctcagggtgcctctggcttgtgtgagaagaagactaaggacatgcgaaagaaaggcaagaaagttagagaacttcttcagaaaggtgttatataaaagtggctaagtctcagtaagtctctgaatgaggtagagtgtttgcttctattctaataagtctcacatcacaaagtgttgcgttttgaacttgtaaggggtcttacatttaagggttttagtgggggtttgctatttaaaggaaagtttccctttagcgttactttaccaaaaacatttacaatcaatataaacttcttctctcatcttactctccgccgtttccggcgcatttctctattccctctcttatttcttaagtttcagtttggttaagccccaagcttaacattggtgcttccttgagagnaacaatggcccagaagaccaaa

SEQ ID NO: 26581 - DNA, 1130 bp, Arabidopsis thaliana
  unsure (1)..(1130): unsure at all n locations
ctctgaaaagacaaaacagtcactaactgtttgtgctaccatttcgctaatgagcctaaatacaaattcagaacaatacattaaaggatagagcagacaaaccctaggatctgtcaccctggcataaggtaacccagtaatgacgacagctctgccagcaccgtcagcaaaatccagtccttcgctgacctgacaacacaacagagagaccagccatactgaagacactacactagagaaacttattgacctcctatcttttataccagcatcctcatacatactatatggatacaggagaaaatttatacaggttgaagaatacataccttaccgcgacaaacggcaaaaaacaccacacccgaagttgctctgtcttgcaatttttctgaaaagtcctaccattaacaaaaatacaagacacgattaaattaatcctattcaagagacgtagatcagaggcatctcttgctcacccgcattgctgcaggaaagagggaggaatccttgggttcaatgacaggtttcttgagcttgcaaattctttcccatactgtcattgagtttctgtaacactgaatgatgaaaaaacggtaggtttacaagctaaagagtactcattttttcatacttaagagaaaattaacaacggccataccccatttttccaaaatgtaatgcaagagtccataaggtaataggaagggaaaaatatcagcagtccttcaggcacgactcgagacacgttaactgcagagtagacacacatactactcccctgcccactataaggctagcagcttcgattttcagatctccccagactctagaactcggttcacaggtcagacattcagaatgatacattcaggccatccaatatgaactaccaaataacaaaacacttacctatggcattcccaagttcttgtttgtactctgggacatcacgattgcggtacgtagaattaagaacgtaccctgatggaccagtacttacaactccagcccatagctgatttgaggatataacatggggattctcaaccgaatgggaaagntcctgcgttttcaaaaacagatgtttcgattataagctgggggaaaagggagatagacaatcatagtga

SEQ ID NO: 26582 - DNA, 997 bp, Arabidopsis thaliana
tatggttcggttcagcgacaaagtctaaaaccaaatgaagaacctttcggtacgagtatagataaccgagttcggtcatattgttcttcccttggcagtaatggcatccggttacggtgttgttttcatggaagattgttgttttgaggaaccattttccaccggagatgacaacgtagtcgaaattgatgtactgatcagtccatttctggtctagcttgtcgaggtgtactcgaatgtctgagaaaggaactccgttctcaaaggtttcagcttttacaaggaaaggagaccaaatgacagagagtgtgaagttgtaagaagggaatctccagatccttgatttgtattccttgtcatggaagatatcttctacttcttctacctaaaacaagggcaagtagatttaaggctgctgctatacagagaaatgaaattagagaaactgttgttgtacctgagagagaatgcagaggagggattggacatggttacgagagatggaatcaccgataaaagccaaccatttgttcctcatattgtcaaggaattgctcagggttaaacctcgggagatcgcaatcgcgaggttgccatctccatcgaaggtaattcacatctggccttccgtttttcaagcaattttggtaatcttggatatgacggcaagagacattggtgtagattggccctgatgggtctggtacccaattcccgataaagatatcacacttggttgaaactacaattgttcaaacacttggtgagcacaaatccaaaataagaatttcttctcaaaacccaatttcctcacgttgcttgggtcttactctattgaatttgagactaaagtagtgatgatcggaaaaagatgatctcttaccattctgtgaagcaatggttgtgatgtttgctggggaatcgacagaggctgaagtttgagtgatggcagtgagacctgaaggatccggcgggagagattccggcgaggatcgaac

SEQ ID NO: 26583 - DNA, 139 bp, Arabidopsis thaliana columbia
ttcataaaacttttcatcaattcctagtttctctgcatttgaacgcacgtagctaaatgctgcctgagctgattctttcatcacgtctccaagctttccggttagcactagtcttcctttaccaggggacaagcttact

SEQ ID NO: 26584 - DNA, 598 bp, Arabidopsis thaliana columbia
tttatctttcaatgttccatcagaaatcaagcaaggtaaattttgaaaccacagtaacgccataggcaagtagaaatcttcatatagacgcaacaaactagaccatgaaaactttgtcggaataaaagcaattaagctcctcctccagtcaccatatcagtgaatttacaacaatgcatacctatgaatgtcaaattcaggatgtccaaggcggccaccccttccaaatccccacgtgtagacttctccatgagtactaatggcaacactatgaaactttgcagcggagaccaacttaataaaacaaccatgcagtgaatcaactctccctggtaccttctgaacatgttgattgccagttccaagttggtagtttgaccatttcccagctgaaaactctgtagccactgaaaagaaaaatgaagccaacatttcagcttctcaaaagttgcgtaagaaaaagtgtcaagactgattaaggttctccttaaagatcaaagagaaaatattagttacccgaactttgttgcacgccaataactgagccctggcctgagccaaacaaccggtgtcgcagttttatgtctctagagtaaag

SEQ ID NO: 26585 - DNA, 640 bp, Arabidopsis thaliana
tgtccgacacgcttcttggaaagttctctatctatgcacatccattcctgcaggaatccacagtattttcatctatttctttgccctagagtcaccgcgttggctccatttggaagggaagaacaaagaagccattgaagtgctcaaacggatttcacctgcaaatagaggttacttggaatccgtatcttcgaggttacgtccaaaagaaacactagagcaaacttcaagctactcaatcaaagacttgttcattataaaatgggcttttcgaagagtcacacttgttatgatcataatgtttgggttgggaatgtcgtattatggagttccattagcggttagagacataaaagtgaacatttatatgagcgacgcctaaacgccatggtggagttaccaacatttgttgttacaccgatcttgctcgagcaattcagcaggagaagctctgtgcttgtaaattgcttaattggaggagcatcaggagtgctctgtttcgtaatgagcctttacggaagaacaaaaatcgcttttgctctcgaactcggttctttcttctgcgctaggattggatcaatttaatggcgatttatttggttgagttattcgtacatgcgtgaggaatagtgcacaatga

SEQ ID NO: 26586 - DNA, 1357 bp, Arabidopsis thaliana
gtcgactcgatcccctccacttatattgtcatactcattactcttttctcttgatatcttctgaaaatgttatcccctggacattatgctgcgataaagtcatcaacgaggcccaattctgaacatcttctttttaggcccaatataaaacgtagtctctctatttgtctacttcgataatatgtgttagcactttcttgtgctttgtataacgcaatcagtatgtatcacatatgttgtaaataggtatccttacacatcttagtaatgtaaaacattttatgtccgatgtgaataagtgtatatttgttcttggcaaaaaaagaaaagaaaagatgtatatttgttgttgttgttgttgtgtgtatcttggaatttatagaaaaaaagaacaaaatgtcatcacggaatctttgagttgtacctttttattattatcatcatcatatctcatatccacctaaaacagtgtcaactattaaattctcgacaacccacaaaagcgagtacgcacacacgtcagattccgacttgtcaaaatcccgtgtccgagatctacttacagccgcagagtccacttgtggtcctcagactaacatcgttgcctctatctccaccgtccgatcttctttaataataccaatagagacaaatgtttttatgacaacaaaaaattaaaaacaacaattaaaaaacaactctcaggatccgaatcagttcccgcttcggatcgtcagacacggacaagtacgccacgcatgacgtcatcatatctgcgggttctgtttcatcatggacacgtcagcggagacgatgagagccgttgattagacaagaagaagaagggacggctgagatgccttgacgcgttagctcagccaaaacgctctccgcggacggcggttttagcccgagcggtagcggcagccacggtttgcttatcgcttctttaaccacttgatctaacatttcctcgtcctgacccgacccatttacatcgcaacccgacccggcaaattttattttttattaattaattaggaatttttatgtcttaaaaagaaaatagagaattgttgacactaaccggctgactcgccggcattattttgaagccggtttcagctccgttgggatattgaaatccgccggcggtagtattctgcaacaaaaaaacaaaaatctctttaaaaattaaaaaataagatttttgtaatgattaaatttccataaatataaagtttaatattatagattgtgaaaatattcaccgaaggagtaatatatgatccggtcacaggcggtccaaccggacaaccccatgcattaccgctcacctgaaacatcatatatggac

SEQ ID NO: 26587 - DNA, 501 bp, Arabidopsis thaliana columbia
gcaatctggtgtcaaaacctctgatcctgcagcgaggaagagtttcgacaaacctaaaccaacaagcccagcaacatagtggcagtattcatcgtagtcatcaacagtttctacctgtgtataatagtgaaaactggatcaactggatcggtaaacaaatgatttcatttctttacaaaacttataaataagttttggtactttcaatacaattactacttgtcatatcatagaagcatcacatgaggcattccaatatttatgacttatgacaagattaagcatgacagtattctatctgaaacagagacctcagtccagctcaagacattttgtcaccataactcaaaaacaaatccaactacgaaaactgctctgtatcacagacctcttggcagataaacttggccatccctgcacccattcttctagtaatttcctcgatagcctcttgataccttcatatacaacagcatatgttaggaatgaggtaattagtat

SEQ ID NO: 26588 - DNA, 518 bp, Arabidopsis thaliana columbia
tgcaaagattaaacaaaagccacatcaagagttagtgtaagtgcacacttgataatgccatcgtcttcagttccatttttcttgacaagggactcaatcatctcagccttagaaggctgtgtccgaacagatgctctatatttggatatcagtggccactccctagaactcaccacctaagttaatcataacaaaagagacaactaaatatcagtcttgaagaactagccaaactaaaaagcaaacaacagcagtgagtaaacattttacagcagcgatggacgggacatcagactgtccaggagatccatgtgaaacatccatcccaaggataatggttggaaccttagaaatcacagtgaacgcaggtgtacgctctacacttaacattgagttcaggcctccaagctgtagttatatgttatcagagattgcacaccagaagccaaaaccatttccaaaagagaaaaaaggagagagatcactttgcattaatcttcagaagtaagttagtaaga

SEQ ID NO: 26589 - DNA, 545 bp, Arabidopsis thaliana columbia
  unsure (1)..(545): unsure at all n locations
nnnnnnnnnnnnnnnnnnnnnnctaaagctgatgcgacgctaacgcgtctttatcagacctatagccgctgccagatgtgtgctggataaggtgttcacgccgcatccggcaataagacgcgatgatattatttacactccgccaggcgtttaaatcgccttaatatccctgctcgaaatagctttcgagaataataaccgcagaggcagagtcaactttgcctttgttgagcgcccgatagccgccctgttcaaacagaccggaacgggcttccacagtgctaagacgctcgtcatggagctttacttcaacaccgaaacggccatgaatacggttggcaaatttacgcgctctggcagtcaatggttgctcggtgccgtccatattcagcggcaaaccgacgatgatttcgtccggctgccactctttcagtaaacgctcgataatgttccagtccggcgtaccgtccatgtgctttaattgcaggcaaagggcgagcggtgccagtaatgcgttggcgaccgctacgccaatgcttttggtg

SEQ ID NO: 26590 - DNA, 515 bp, Arabidopsis thaliana columbia
ctagtaaagattatcttgaacacaacttttcgttctgtactatttccaccatcatacggtaaatgtctattggatgcaacaatttctgtagcatttgacaacgaagaagaacgcaaatttgggaaaaactcagaatgtggatcctctgagttcccatcagttgataatgactcataacctttgatgctaagcggcggtggatacccattgagaggtgcattattttgaatataactcgataccataactagtgccttcttcacagccaaaacatcaccagtaatctaatacaacacacaaagaagtgacattcacaacatatcaaaaaccaaataaccaaaacaaatttaacaactttttaaccaaaaatcatataaagacttcaactttacctgaatgagttcatcattcttagtgccgcaaatcggaggaggcaaaaccctaatcatggcaccggaatttctccgcatccactcaacatttttccacccaaacccaaaacagcaccaatctga

SEQ ID NO: 26591 - DNA, 603 bp, Arabidopsis thaliana columbia
  unsure (1)..(603): unsure at all n locations
nnnnnnnnnnnnnnnnnnnnctaaagacaaagtgcgcttttggatacatttcacgaatcgcaaccgcagtaccaccggtatccaccaggtcatcaataacgatgaagccttcgccatcgccttctgcgcgtttcagcactttaagctcgcgctggttgtcgtgatcgtagctggaaatacaaacggtatcgacatgacgaatacccagttcacgcgccagtaacgcacccggtaccagaccgccacggcttacggcaataatgcctttccattgttcagaaggcatcagtcggcttgcgagtttacgtgcatggatctgcaacatgtcccaggtgacgatgtatttttcgctcatgtgaagtgtcccagcctgtttatctacggcttaaaaagtgttcgaggggaaaataggttgcgcgagattatagagatctggcgcactaaaaaccagtatttcacatgagtccgcgtctttttacgcactgctctccctgacgcgggataaagtggtatcacaaacatatctcgcaagcctgtcttgtgttgaaacattttctgctaaccctgtgactgcaatactgttttgcgggtgatcgcaaggag

SEQ ID NO: 26592 - DNA, 496 bp, Arabidopsis thaliana columbia
  unsure (1)..(496): unsure at all n locations
tnnnnnnnnnnnnnnnnnnnnnnnntaaaggctcacttgcttttggagaagctgattatatcgtccgggttcattggcgaggattgcgctggttaactgcagaaggaatgcgctttgacatgatgggttttctgcgcgggctggattgcggtaagaacggtgaaacactgtaatgataggcaattcaggtaataaaaaagccggagctccctttccggcacgtctcattgccgtatcacttcctcccgaaaaagcattaatcagtaaaacccgactgctcagcgagaatcgtcgaaaaggacgagtagttcaggcggaaacgctggaagcagcgggccatgtgctattgctaacatcattaccggaagatgaatattcagcagagcaagtggctgattgttaccgtctgcgatggcaaattgaactggcttttaagcggctcaaaagtttgctgcacctggatgctttgcgtgcaaaggaacctgaactcgcgaaa

SEQ ID NO: 26593 - DNA, 627 bp, Arabidopsis thaliana columbia
  unsure (1)..(627): unsure at all n locations
cagttcccctccttcacacaactccataactatatgcaccgcatcatcatcctcaaaggaatccttcaaagagacgacatttgggtgtttaggcatatgcttcataatctcaacctccctcctaacatcctctatatcaactgctgttctcagcttcttcttagatatggacttgcaggcatacttctcaccagtttccttatcagtacacaagtaagttataccaaactcgcctcgaccaacctcacgtccaagatcatactgcaaggatatatcatgtcctgtaggatctttcagcacagagagcttaaaaccagctccagatctatctgttgtagcgtattcattgctgtaaaaaggattgtttttgttcttgggtttccttgtttactctggttcgtagccgaactcggattgccacaacaattccccatctaatcaaatctcaaggttcctgaaaaacccagaaagattaaaactttgagcactgttcttcaaggttccattagtaacttaagccaataactatttctaattaacaacatatcctaaatcaaacagaaccctaatctaatatcgtcaaaccagattagtanacctagctaagacaaagacaagggaaagagg

SEQ ID NO: 26594 - DNA, 621 bp, Arabidopsis thaliana columbia
tttgagcatacgatgtgatttcctcctttgcagcttgttccaggttctcacagttggtgaaaatgaatgtggaatgattctgttcagttggcatgatacgggccaaagctttgaaactgtcttcagcgaactacagccgtgtgcatctaagcactgaagatttggtggaaactctggaactgatgtaagactcgtacaatacttcaggtccagccatttaagttgagaaagctgactgattccaacaggaaggcagctgatcttagcatttctgcttaagcacaaatactgcactgagggtaattgtggcatcacttcaatggctgtcccatccaaaagtaaaatgtttaaaaagctaatgtcgatttctgggaaaatcttgagatttaaacaatcagagagtatcagttcttgaagagctttcagctcaccaacacggcctggaatttcctctagcattttgcagtctttcatattcaatacaacaagtctctgaagcttctccatgttcataggaagctgacttattgctgtgcatctaagtatagagtttctatattatctgaaatcaacggaaattccttaaaagttgagcagcgctgagagtaagtgtttcagaga

SEQ ID NO: 26595 - DNA, 598 bp, Arabidopsis thaliana columbia
  unsure (1)..(598): unsure at all n locations
nnnnnnnnnnnnnnnnnnnnnnctaaagcaatcacgatggcggcgatatcttccggcgcggcatcatttttgaagatccggtggatgctggcgatacgtcatcctcgcttatgccgtgcagcgggcaaggataaagcgcgcgataaacatgacccggcatcagccccatgcccgcagagtacggattcaccttgccggtcagcgccacgtngtaatgcgtgcgcccgtgatacgcgccgctaaaagcgatggtgccgctacgtttggtggcggcgcgggcgatttttaccgcgttttccaccgcttcggaaccggtcgtaaccagcagcgttttcttggcgaaatcgcccggcaccttctgattcataatctcgcacagctccagatacggctcgtaagccagcacctggaagcaggtgtgcgacagttttttcaactgcgcttccaccgcggccatcaccttcggatgcaggtgcccggtattgagcacgcaatcccgcccgcgaaatcaagatactcacggccttcaacgtcccacacccaggcagttttccgcgcggtcagcgaaaatcgggtgaatttgccaacgccacgggga

SEQ ID NO: 26596 - DNA, 619 bp, Arabidopsis thaliana columbia
  unsure (1)..(619): unsure at all n locations
nnnnnnnnnnnnnnnnnnnnnnctaaagatattgatggtgacggtattgtcacgacaatgccaatgccggagtacgatccagagaatccgccgatgctcggtttctttatggtcggcgcatatcaggagatcctcggcaacatgcacaacctgttcggtgataccgaagcggttgacgtgttcgtcttccctgacggtagcgtagaagtagaactgtctgacgaaggcgataccgtggcggacatgctgcaatatgtacagctcgatccgaaaacgctgttaacccagttccgcgatcaagtgaagaaaaccgatcttgatgctgaactgcaacaacagttccttgaagagttcgaggcaggtttgtacggttatacttatcttgaagatgagtaagtcctgtgttacttgaatccgcttaatttagcggtgataatccgccacaatttattgtgacaaatccaacccttcctcgtcgggcctaacgacgcggaagggtttttttatatcgactttgtaataggagtccatcatgagcacttaggtcacaatacgatactcactggttccaatcctttggtttttacgctgctgatgacttcagcgtatgcacgatcag

SEQ ID NO: 26597 - DNA, 575 bp, Arabidopsis thaliana columbia
tgaatgctgtttccatctaaaagacatatcgattgcttttgtttttgtttttttctcagttcgatgagcaaaaggatgatgtctctaaggagcaaatattgcgtgtgattttcttggatcctgagcgctccaaccctgtgagtatccgaataattttgcttatgatgacgattctattattttacgacctccctctttaataatctatgtgataaatgacataggcattggaaaaactgaagcgtcaattagcagaagcggatgcagcggtggaggcacgaaagaaacctccagaggaaacaggtccaaagatgattggagaagggcttgtgatcgatgaatgggtcagtctcatttgctatccagtgtctcttccattagatgattgtgaaaatctgacattgtttttgtcttacctctaataaaaacacagaaggagcgtagagagagatatcttgcacagcaacaaggcgaaggagctgactctgtctgagagactaaaagagttttctcaggacaaaaacaagtgcgcttgtgaagatgaagaagaagggaccgctatattgaatttatat

SEQ ID NO: 26598 - DNA, 1290 bp, Arabidopsis thaliana
ttcattgtttgattgaagctctccaaaagagcgcattgtcctccacagtctttatttttgcagcgccagcaagaacttcactgctcagtcttttggcattatcttgagcatgagaaacttctctctctaactttgatattgtctccaaacactgctgatatcgaacattcaagtcctcattgacttcgttcaacttcagaagttcttgtttcaaagctttgatttcagtttctgcttgttccgattggtccctgaatactctaacactctcctccgcatctctaattgtcttctctaaggaagatatcaactcaaggcttttattgtatcgtagcaagccagcctccttctcagactgcaatctagaaagctctttcttgagactcatggcttctctttctgcttcagacactcggttagtgagccccttcgcatattcttgcccatgagaaatcgatgcttccaaatccgctattctctcaatggcttgactatactgaagaagcccagtatccctctccacctctagctttgcaagagattccttgagtattttaatctcaatgtcagctttgcaagcacgttcatcaaatcctttaacatccttttgagcatcgttgagttccttttcaaatctggatactttgctcaagattaactgatattggagattcaaagcttccttttcagtctgaagctcaagcaatgttctctttaaggttcaacttcagaatctgcttcgtgagaatcagaagttccatctaatttattcatctgactaaaactccttttacttttagtaccatccttttgtagagcttctgtatctgcttctgtacgaggctcagaagaagatgatgcagaatcctcaatcatgtcaaaagacatctggttaggaaacgcctcaaccatgactttatgcgcacgccgaagctccacagttgtatgatcatacctctcagctaaagcacgataagctctgtatagctcttccaccagtttcattagctctggacgtttcttgaagtacatgtctgcccttcttgcaaacgaatctgcatcagcttcgatgagctttatcattgtcttgactttggaatccatgtctgtttcaacacaaacaaatatttcctttaaattgacttccaaaagaaacaaaatatctttaaacatacaaatcaaaagcattataatgccacaattttcaagactcataaaaaacaccaaggagaagtcaagaaagattatagaatacctgcaaggttatcgtgaatcgattttgagttttta

SEQ ID NO: 26599 - DNA, 507 bp, Arabidopsis thaliana
tatggtaatctgttcccttctcgatgaagagacagcgttacctacggtatccgtatcggcctctattctcggataaatctcactaatacgctttttaacgtccgcatacttgtcaggcttgctgagagcctttagatgataataaaacgtactgcgcggtatctccgcagccctgagaagctcatcaagaggataaaactgccttagctcgttgagtactttcactttttcgtgggatgagctaaggctttcagcttttttagatacataagccgcgtttcaagaaatcgaacttgcctttcaagatcctcaatgcgtcggtcttttgacagctccaatgctgatgccgctttttctggatcaactgatattgcaatgtttcttttggtgccaatcttgagcgcgcgtaaaccagcttctccgcgctcttcatagaccttcagccacctggctacagaaccactaccagcaagcataaagtgagcagcagcctgattaagggacatg

SEQ ID NO: 26600 - DNA, 312 bp, Arabidopsis thaliana columbia
gttcctccaccaacgcatccacaacatctcactttccccggcaaatgaagatccggagacgaccactggtaataatcaggattcagagaaatacccaaaccttaatcccattccaaatgatccttcccaattccagattcctcagaatcacacccctccaattccctatccacccatcccgcatcgtaccatggccttctcttcagccgaagaagccgctgctgagcgccgccgccgtaaacgtcgtctccgaattgaacctcctctccacgctctccgtcgcgatccttcagctcctcctccaaaacgtga

SEQ ID NO: 26601 - DNA, 495 bp, Arabidopsis thaliana columbia
tgagtgaacagaggactcaggcttgcaccagtaactaaaatccaatgatgtttatgtcacaaacagaacccttacttgaagagggaaaatgcgctctcgtgcattcctctgccaacgtagagtctgggctgcaaggtgttaattatagtcacatcagttaaacaacacaacagaaggttttcgttagtttcttatgcaagaacacaaactgagtgaatagatgaaaacctgagaccaccacatcattagcattacaattctgtagttggacctctcaagaaaccgtcgtagcagagggaaaagaaacattacacccgcgagcatgttaggtgacaaataggaaacgactgctattataaatagagaaggtgagtgcatacactcccaaaccaactcttgatagttctggcaaatgctggaggatctttccagctgtaggcgtaagtaacaggcagaataatacccaggcagcagcagagaacactttcagaatgt

SEQ ID NO: 26602 - DNA, 532 bp, Arabidopsis thaliana columbia
gattacccgttataaccgcatcaaggccgacccggatgcgaagtgggtacgcgcgtgaatatttttggcggtaaggcggcttcggcctattacatggcgacacattattcatttgatcaatgacgtagcgaaagtgatcaacaacgatccgcagattggcgataagctgaaagtcgtgttcatcgcgaactacagcgttacctggcgcagttgatcattccggcggcagatctgtctgaacagatttcgctggcagggacggaagcttccggcaccagtaacatgaagtttgcgcttaacggtgcgctgactatcggtacgttggacggtgcgaatgtcgagatgctggatcatgtcggtgctgacaatatctttatattcggtaacacagcggaagaagtggaagaactgcgtcgtcagggctacaaaccgcgtgaatactacgagaaagatgaggagctgcatcaggtgctgacgcaaatcggcagcggtgtattcagtccggaagaccgggtcgctatcgcgatctggt

SEQ ID NO: 26603 - DNA, 608 bp, Arabidopsis thaliana columbia
  unsure (1)..(608): unsure at all n locations
cctatctaaaagcaaaatctgaattatgtagggatttagaaatagaagaaagtaaaagttgaggaactatcgttctcagaaacaaattgaagacttcaaatcaaacataataaacaaagaacacatgagaactgtttcagaatgagaaagagaccatagaagaatgaacatgaactgatattatagagattccttgaggctcaaggtttcttctttcatggtttccaaaggattgtggattcagcaatcatggaggtcacagtgtaaggatccatgttcgaagctggcctacgatcttcaaagtatccttttccagcctgctcagtgtcacgcccaaccctaatcgatgccccacggtttgccacaccctgaataaacgagtttagttagattgtggtttaggctcaagtgatacgaatgatcaatgaaaaaatatacaatggtaataattttgaatagatgaaacaaaaaccaattcatgtcactgtttttataaaaggcataagagtttagttcccataagaaagtgttgatatcggcggtttcatgttttccggtgagacgacgctcgttgccttcacataagcagcaatgtngtccttgtgacg

SEQ ID NO: 26604 - DNA, 606 bp, Arabidopsis thaliana
tctagccacgtcgcttaacaatctcaaagtccaagaacgtcagaaccgtgtttgcaccacagttgcaatcgccatagtcgctgaaacatgctctcccttcaccgtcttacctgctttgatgaatgagtaccgtgttccagagctaaacgtccaaaatggtgttctgaaatctctctccttcctcttcgagtacattggagagatgggcaaagattacatatacgcagttacaccgttgcttgaagacgctctcatggacagggatttggttcatagacaaacggctgcttcagctgtgaaacatatggctctaggtgtagctgggttgggatgcgaagacgccttggttcacttgcttaacttcatttggcccaacatttttgagacatctcctcacgtcattaacgcagtgatggaagccattgaaggaatgcgagtcgcattaggagcagctgtaattctgaactattgcttgcagggtttgtttcatccggcgcgcaaggtccgcgaagtgtactggaagatatacaattctttatacattggtgctcaggacacccttgttgctgcttacccggttcttgaagacgagcagaacaatgtgta

SEQ ID NO: 26605 - DNA, 475 bp, Arabidopsis thaliana columbia
tgatcatcaacacacaaacaaacttttttttgtgtggcttttaggttggttgcactccgcttcacagggcagcaagcgtgggaaagttagaagtttgtgaatttcttattgaagaaggagcagagatcgatgctacggataaaatgggtcaaactgcactcatgcattcagttatctgcgatgacaaacaggtaaaattttcaatctaatcaaccttaaaagcaacatttctttaaagttaaaagtttccatggatcaggttgcgttcctgcttataagacatggtgcagatgtggatgtagaagacaaggaaggctacactgttctaggccgagctaccaatgaattccgacctgcacttatcgatgctgctaaggccatgcttgaaggataaaatgactctggattactttaaaacttactaactctgagagttgtttagttacttaaaaggatttttctttactgtatcatg

SEQ ID NO: 26606 - DNA, 581 bp, Arabidopsis thaliana columbia
cctcagattagacctccagtaagaagtgagaaagcatggacgacgactgtgaagaattgagctaatgagctgaaccggatccggtgaaattgcagaaccggatcggagaagaagaattttgcatttgtgcatctttatttttaattgttacgtttgagccccaataatcatagatattgtagtgaagaccaaatttcatggtggatcaatcaaattgtattttcaaattttcgtagtgtaataacggaaaaaggaataaaaaggtcactgagtaaaattaatgtatcagtggggatggtgttcgtccgagacttgaagattatcgatgcctttaactactgattcgtagtgtcttcttgtggatttcccagcctccccaggagagtttctcgggatcacgccgcggctgacgtcacctgtacggcttctctgcaacaactcctcgctgcctggaaaattgtcccggctgccacttactgcagttactctcctcgatgatcctgctgattgtgcaaacaacgaggagctcgggatctgcatccaaaagaaattgaacaaagttttgatacttttagccacta

SEQ ID NO: 26607 - DNA, 1982 bp, Arabidopsis thaliana
  unsure (1)..(1982): unsure at all n locations
taacatcagctatgttcattaagcattaaatgtttggaatgagaaattgtatcttgaagggtttatgttttgtctgtgacagtgttcaggagcttctggtgcgattctactcacatcagctgcacaaaacttgctatgtctcaaactagcaagagaagttggtgctgtaatctcgaatccatggatcacttggtttaaagtcgctagtgttcctgcgtttgtgtctcttctttgtactcctctcattatctacaagctttaccctcctgagttgaaacacacaccagaagctccggctgcagctgctaagaagctcgaacgattaggtcccatcacgaaaaacgaatggatcatgctcggcgctatggctttcaccgtctctctttgggttttcgggtacggtttcttgcagaatttgaacaaagcatcattagtatcatacaagagaaatcgcataaaactatttagtgtctaaaactagacgtattgatacataagtctataactacataaaactcactaaaaaagttttcaaaatcaacgttaaccatattatgaactttatttttcgtatctccttgcagagaggcaataggaatagcaagtgttgtgtccgcgatgataggtctatcaacacttctgctgttgggagtcataaactgggacgattgtctcagtgacaaatcagcttgggactctctcacttggtttgcggttttgattggtatggctggacagctaacaaacctcggtgtcgttgcttggatgtcggattgtgtggccaaactgctacaatctctctccctgacttggcccgcgtcattcattattctccaggcttgttatctcttgatacattatctatttgcaagccaaaccggtcacgcgggacgtctctatccgcctttcttggcgatgcaaatcgctgctggcgtgcctggggttctagcagcgctttgcttggctttcaacaacaatctctctggtgctttggacattatagtggtggacggctgctttatattacggaggtccggtttcttctctttcgaagtttttatcatatttctcatatccttagttatcgaattaatcgaccattcaacactttcttacaaaaaaaaatattggtctggatctgcagctgggtatgtagactgagagatatgtntagagtcgggttcgtgatggctcttgtacaagcgatcatctggggaggtgttgatctttctggggaaatttttggtctctactgaacatatagaaccgaaaccattccctgagcgtttgaccggaacccaaaccagtccaaacacaaccataatttcggttttgagggtatctgattcaggttcacacagccaaataccaattggttttcttgtgttcgtatattaaagatgtaaaccgtagaagttagaacattgtatgtatgtatcctgttttccttcggcagcgaattctcagttaaacctgaaccaaaatcaaccaccataaattcggtccaaattcagtaagatttcaacgagtaaaccaaatttatgaacaaactgacacaaccaatttccacagtaatatatgttcactcagtctcgcaatatgaaagatctaaacagctctgcttatttggagtcttgacagatttctacgttatttcatgaacctgcaactgtaatgcatacaaataacatgaaacttaagtcaataagaaataaccaaaagtgaacataggttttctagttatcagaaaaagaaaagaaacgtttctgtgttttatacaaagcaaacctttgcaataaagccaaaataccaacaactacaggtgactagagagtaatagaatcacatcgaatccagaatctttctttcacacaaacatcgtcaactccggtcggctatacacattgttctgctcgtcttcaagaaccgggtaagaagcaacaaggttttcctgagcaccattgtttaaggaatggaaaacc

SEQ ID NO: 26608 - DNA, 836 bp, Arabidopsis thaliana
tgtcgaatgagaatgaagttaacgttgccattgctgctcttgatggacaggtaaaagaaatcactcctccatgcgtttatggttatcttcttgtgactttaccatttcttttattcattgctctctgtgtttgcagaatttggaaggcagagcaattaaagtgaacgtggctgaggaacgaacaaggcgttgattttgatagctcagtgagtgttaatattgtgagttatgattagaaatgttctcacttacaattccaatgtagcgagtatgtgaaaccaaacttgagttcaagcttttgtaaacatattttctttattacccatcaaaacatattacaaaacattacacaaccttttatatgtacactaagacgtgggatgtagagttttctctttgttgttgttgtcaaaatcctcctaactgttcgacacggctagtgaggggcacataccggactgaagtttcggtatgtaccttgattgaaccatcctcgtttttgtcgattaccttgagctcttgaaaataggttcctagtggaatcaccattcgtccaccgggttttagctgatccaaaaggggctgagggatttctgatgccgctgctcctacgtgtattgcatcatacggtgcaaactcttgccaaccttttcttccatctgccataagatacaattgagtcaaaagatgccaggcaaggaactcataagggagagcgagtacttacccccaacatgtaaggagagagatcctttcttaagaaaggaagcagcaacactcttttcgatattcttgatagacatatcaaccaattcagggatatgatccacgccaac

SEQ ID NO: 26609 - DNA, 507 bp, Arabidopsis thaliana
tgctggtttgtcctcgcatgtctttttaaagacctttccaaattcaccgatctgttttctaacatgagaaggatcaacgtcgtagaaaaccggtatcaccttttgtccaaaatatttagagcaattgtcgatttcaaccaattcagtcaagcatcacgtggaagcagcatagttcttagagaagatgacaattgagatcctcgcttctctaatcgccgatataagcgcatcggcgattatgcagcttctctcgatgacgtgatccatgaatgtattgattgatctgcgattgagctgcttaagaagatggctgaggaaattcttgcgaacatcttccccactgaagcttggaaaaatgtcgctgccagaagaagaagctgccgccatgaaagatgatgagtttgagatagaatatctttaaaagaagtagatcagcaatacataatgattagtgtgcaggaagaggagaaatcgtgcatagaagccttatgctgtgcgaaacggagt

SEQ ID NO: 26610 - DNA, 577 bp, Arabidopsis thaliana
cattgttaaatatatttttcttatttacttttacaattgtaaatagtttagagtttggcttactgcgtcagaaccactgtaggctgctgtttaaggagcatttggtttctaagggtttcatgtactggatggaagaagtcgtgcttgagagcatcctctgcgctgattcgtcgcctcgggttaacggtcaaacatttatcaacgaggtcaagaagcgatagtggaattacgtctagaaactctctgcgttttgtgttgagttcgcaccattttctcaactccatccccttcaagtaccttgactcgtataattcctgaaacaacaacacaaaactctacctgatttcatctctcacgatcatctatctaatcactttgtcatcaatttacattattaagatatatatgttctgtaatgggagtgcagtagaagcaatagaacacaaaacgctaacaatgaaaacccttttatgtgatatttaagctggcggtaaaaagaacagagcaagtatatgtgtccataaatgaatggagagtcagaagagtggtaagatgagatgttacttagggaaagagg

SEQ ID NO: 26611 - DNA, 599 bp, Arabidopsis thaliana columbia
  unsure (1)..(599): unsure at all n locations
gttttttttgacaattaacttgctgaatttttctaatgaagaagaactagatcatgcaggaacaaattacaattggaaaaagcatgcccaactgatcagcattagaaaaattatgggtttcgtaaaacgtgctgcactattttattcagggaaatgagtttacctgtattcacagagcgctttttggtaaaaatttcgtggcagcttctggatggtcaacatactcgacctgatgattagcattagacaagcttgaaaaatgcaggactgttatcgtatattttagagcttacctggaaaaggataccatcccaagaaaatggctcaggtgacagttcttggcatctatctctaaactgtctctctagggcagatgataataattccttgtcaccgtaaggattgactaccacaacagacataagcttcgaagcatgacaatataaaacataaacagcacgacctgttgaggtgctgcaaaaacaaggaaaccataatataagatattagggaaccaataaatgaagccaaatagcatatgcccaaagaatanaagagacaaaaaaaaaccacaagcaagacattccttgatgaagaag

SEQ ID NO: 26612 - DNA, 639 bp, Arabidopsis thaliana
aaaactgaactcaccaattgaccccaatcatttaagcgattgtgatctcaaccaattcatccaagcaccaagtggaagaagcatagttcttagcgaagatcacgattgagatccttgcttctctaatcgctgatattagctcaggggctattgtacggcttcgttcgatgccatgatccatgaatgtattgattgatctgcggtcgaacgcctcgagtagattgctgaggaacgtcttgcgaacatctaccccactgaagcttgggaaaacatcgtatctccggctgcaagaagaagaagccgccgccatggaatatgatgaggagaagataagtacagtaaatcgaatacacagtgattattgattagagtgattactgtgaggccggtccttaagggtgggatgcgcaaggaaacttcttattttttgcccataggccataaatataaaaatgtagcgaaatgtttgtaatgaggttcgaaccaaggccaatgaagcatttaaaacctgatttcaagtattcaaccgctcaactacaagttatgatgcctcttaaatcaatattagatttattttggtgtccaaggtctttgcttattgtaaaaaggacagcttatcgtaaacatgttgagtgggga

SEQ ID NO: 26613 - DNA, 1521 bp, Arabidopsis thaliana
  unsure (1)..(1521): unsure at all n locations
taaaggtatatttcggagatatgaaaaatggaatcctgtgcatcctacttatggagcattttggggaatggggattgggattggttgtggcgtcggatggggacctggttttggccctgaggtcattggttatgtcggtgctggctgcggtgttggttttagtgttggtataacacttgctggtctcggcattggtcttcccacaaattttcttcttgcagctccttataacagtatgtacctcagactctctctctttctctcacacattttttcataaatatgtattctccataccaagtaaactcttagttttgaactttcttgattcgggtctttggcaacttgaatgcacaggtcatgtagtaatcttttgtctgctgattttattttcagctgtggaagcaactagaaagggtgcttttaatttctttggtaaaaacctctcaaccaatggttggagtgatttgatgcctcaaatcgcggggttgcagagacaagtcagtgagatatgctctggttttaacaagaagcctcatttaaataatgccattgacctaaaaagttttcctttgttcatttcacatgattgtggcaaatttggaagtcatcttctccatgtgcgcaaaggtacaaattcaattagtcttaacattttgctatatcactgtgcaaagttcttctctatccgttttctttgtcaatgataaggtacgttagtcttagtatttcaaatagaagctagtctgagcatttaccttgcctttatcttacatataactagcttgcactccaacactcatttcagtctcatgttaatgtttctctagatagaaaatgtttctgttattcaatggcaacccctatattctttagaacaaagtggatagagaacagttagatttatcatttttctttgcaggttcggaggacaataaatcatcagctatgtaatgctacccaccacgaggatcttaagcatctgagacgcatttcgagatagttactttgatggaatttgtgaatgtgactgaaatattcagcacaaatcagaacatggttcctgtcttgtttggagaagcactatgaaccaaacctgaagcccttgtgatttagagttacagagatacattaaaagggttcgggatttcacagtagcattcatagacagttcaggttagttaaacgtgcttcacaaaaagaaaaaaaacagaagtgtagttgaggtcacaccacaggtttatgctttgctcttaatcaaatatttatctttctcttttttgttatttgtcctttttaattccatttgctttattccttacttgtggggattaaatgtttgcagagaaagataattcgactgaataaatacacttttacctgtatacttgttatatatttgtgcaccccaaagtgaaagctgcagactttgaaacacagaaattctcccattgtagtgttttttctcagaacacaagaagagcttatggatattgntaagaagtcatatctgaaattgat

SEQ ID NO: 26614 - DNA, 987 bp, Arabidopsis thaliana
cttccttggattccaagcacagttttaattttattgcctctatatgatcctcaattccgactaagtcaccaaaaccctttggcagaggaaaaagtttattcgaaacatcattagctatctttacaaccatggctgcttcactaggcctaataacaatagtcaaaattgtgtcaataaagaggcacccctaaaagcacaatcgaagattcgaagtgaacgccaagaaaagaaaaaaaaaagtacagttttgcaataattataaacactcatagaaatagtggaataaataaaacatacccgttccgaagatcctccccggctaaatttgatatatctgtgagagctttaacccatctttgtttctgatcctctggtttgtcctcgcatgtctttttaaagacatcgccaaagccaccgatctgttttctaacatgagaaggatcaacgccgtagaaaaccggaatcaccatttgatccaagtctttgtccttgtgacacttgtggatctccaccaattcattcaagcaccacgtggaagaagcatagttctcagagaagataactattgagatcctcgcttctctaatggccgttataagctcatcggcgattatgcagcttctcacgatgccgtgatccatgaatgtattgattgatctgcggtcgagcgcctcgattagatggctgaggaacgttttgcgaacatctaccccactgaagcttgggaaaacgtcgtatctccggctactaggagaagaagaagaagaagccatgggagacgatagagggaactcagagaagagacgaagatttttaagagaagtaaatcagcaagacatagtgtgagaaagagaggagaaacttcgtcttccttccctccaagacttgcatagaagacttactgtacaagatattcttttaagtggctaaaatcaaatctcctaacaagacaattgagacgtaaataataaagaaactcggccttcc

SEQ ID NO: 26615 - DNA, 474 bp, Arabidopsis thaliana columbia
ctttaaacaacactcgttcaatttaaaaaaaaaaaacaagtttcataatcattcccaattagaaaacaaaaaattcagagaagaaaaaaagagagagtggaaaaagaagtataccaaaaaaaggaaaagggaataaagaggaaagggagaagaaaacgcgaacctagaaacctcttcccataagggacctttaacgctagcgtctcgaaacgctattcccatgtcagatcgtattttcaacaacgctagcgtttcctgccgcggccaacgatttcctccaaacccacggtcgtgcatctcttccgacacctcaaacgccccaaccgctgctgccgcgtgcttctgttgccgctgaatcgttgttgtctgattatagcggtggtgctgtagcagttgtgacggttgtagccgccgctgtagtcgtcggagtaccacatccagttgcatcatcgttataataaagttgtggttgtt

SEQ ID NO: 26616 - DNA, 703 bp, Arabidopsis thaliana
tgtaatgtaatcaggtcttaatgataattagtagttttgacttttgagtaaaaaagaaagaaaaaaagaacataaccacatgaattgaaccggttccgtatcattgaccggtacgcgtttaggtacgtgggatttgatatattttcactttcggtccaaaagtattatatatttgagcaagtagtcctacttttttggtttgaaattgtttttcccattaccgttctctgctccattgggttctttcctcttgtctcccagattcatcaatccctcctgctaccgcgagagagtaacaactcaccggacgtttcaaatccatcctccgataactatattcgtttcgttagatctagatctgagcgtcggtgagagattttctggatctgtgatacgttccaggaaacatggcgacgatgaaaagtttgataggtctgataaacaaaatccagagggcgtgtactgtcctcggagatcatggcggtgaaggaatgtcgctttgggaagctctcccaaccgtcgctgtcgttggtggccaggtttgatctctttctattgaatatacacatttctacgttaagatccgatctcacttctcgcctcttcaatctccacgtttctgatttatcatttttgtttggttgatattgtggatcagagttctggaaaatcttcagttctagaaagtgttgtgggaagagat

SEQ ID NO: 26617 - DNA, 537 bp, Arabidopsis thaliana columbia
cctgtttcaagagactcctacacttcctttcttacattgccttacccttccccaaccgctcaaaccgctacttaccacaatactaataacccttactcttcctctccttccttctctttaaacccttcttcttcttcttaccctacatcaacttcttccccaagctttcttcactcccattacactccttcttccacctcatttcataccaacccagtttactccatgaaacaagagcagctcccttcaaaccaaattccccaaatagatggcttcaataacgtcaacaacttcacagacaacgagagacagaatcataaccttaacagttccggtgctcatagaagaagtagtagctgcagcctcttagaggatgtcttcgaagaggccgaagctttagcctctggaggcagaggccgacctccaaaacgaagacaactcacagcttctcttccgaaccacaacaacaacaccaacaacaacgacaacttcttctcggttagtttcggacattatgattcttctgacaacttatgt

SEQ ID NO: 26618 - DNA, 811 bp, Arabidopsis thaliana
tttgctatatctgtgagagcttgcacccatctttgtttctgatcccctggttgtttgtccttgctgacctcgcatgtcttttcaaagacctttccaaattcgccggtctgttttctaacttccgaagatcaacgtcgtagaaaactggaatcaccatttgacctaaatcattaaagcacttgtggatctcaaccaattcatttaagcaccacgttgaagaagcatagttcttagagaagatgacgattgagatcctagcttctctaatcgccgatataagctcaggggcgattgtgcggcttctctcgattccatgatcgatgaatgtattgattgatttgccgtcgagcgcctcgattagatggctgaggaacgtcttgcgaacatcaaccccactgaagcttggaaaaacgtcgtatctccgtctgccagaagaagaagaagccgccatgggagatgatagagagaactcagagaagagacgaagatttttaagagaagtaaatcagcaagacatagtgtgagaaagagaggagaaacttcgtcttccttccctccaagacttgcatagaagacttactgtacaagatattcttttaagtggctaaaatcaaatctcctaacaagacaattgagacgtaaataataaagaaactcggcccttcctttcctcgaaagcttttttacactacatacaaagatatttttgaagattgaatttttgtggttgtcctgaattatgataagtcttagtctttgtacaagacagacataatatttcaatttctaggcaagtagacagaaacttaca

SEQ ID NO: 26619 - DNA, 596 bp, Arabidopsis thaliana columbia
caagcggaattaagtaaacacacaatccgaaattactctcaagaaaacggaagtaaatagttagaacatagtttgaaaaaactttttctctgctctgtttcttcaaacggaagttggtcttcaagtagcagatgatgatgccttgagaagatcaagaattccacaacagttcttccaccatggcgtctcgacctcacgacctgctgctaggagtggctgcaattatattgaataagagtattagactcttgtcttgtctcctaactaattttggcacaagagatataagaatatgaagttttcttttggtgtttggattggaacctgattgtcagtggatacgggtaagtcacggtttgcggttgtggctgctgagtcagcgctaccagtaaagtgtgtaacagctcccatgattttggaagagacttcatctttcttctcctctaatccgtgcaacagggatttggctccatctatgcctcttgacaccacattgtcaactgcatccttgacgacattggtcttggcggttgcagcagaggccataacagtttgtttcgctcaccaagagcagaggtggccttttgcaaaaggga

SEQ ID NO: 26620 - DNA, 515 bp, Arabidopsis thaliana columbia
tttttttttggaaaaatttaaaatatatagaataatgaagagacaccataataaaacaagatcgatcggagatagtgatgacggtgatggttgtggttaagctttgttgacgtggccttcgatgtcaacaaccatgtgcttgacgaatttcatgtagccgcatggatcgggaaagtcatcgatgcgcgtcgcccatatcatagtgagtgtgcagacgcagctatcctcagattagggaataaatgcgaagaggatatcgaatactttgagatgctccatcacgtgaccagccagtcctcttatcgtcaatgtttgattctcatcatctatctctcgcatctcagtgaacagcacctacgtaccatcatgcacacaggtgattattagttacgaggtcgcaacatcccactagcgagttataccatatgggttaatatctgactagcaggaaatccgtggagatttgcgaaaggagtctcaagtaggaaaatacttatgacttttaaacatatgac

SEQ ID NO: 26621 - DNA, 680 bp, Arabidopsis thaliana
caccatgtttttgtgggtaatcttatctaagcccattaatgtttattacgtcaacccctagaagatctctctcatgattttagatgtaataaacaatcaaatatactcacaaaactgaattctaaaaagggtatccttttacaggttaaacaaattcagaattagagcctcaaattgaaccctttgaattgagactaatctttgttttcattttcaatagatagaagctaatctttgaaactttcatactcatatctttattctaagctaaaactaccgaagatactccttccctagcgacctgatttttgctggagagaaatagcagtccaaggagttaatcgctgtggacttggccgccccaccaccgtaggagtagtagtagtggaaggagcagcggtcacagtggcggcagaggaggagacacgttcgcaagaagggcacatggtgagagtagtaggaggagtcatgtgcatgtagagatgtggagacaacttcaacgccctcagctccgacacttctttctgcagccgtcgattctcctcggtcagattatcgcaacatctctttaaatactcacaatcaacctccgtttgtttcagcttcgtcctaatgtacgtacaaataataaatcaaaatcaccttaattagtgaagtgaacgagaaataaaagtttaaaa

SEQ ID NO: 26622 - DNA, 513 bp, Arabidopsis thaliana columbia
gatatgttttaatgttaattaaaaaaaaaatatgatatataacatgaatatgttgctccaatcctaagtgttcgtcaaggaacacgatgaatattgctaccgatcttttatcagggtgaatatgaatattagtcggtaaattcagtttggacaaaaacaaaacaaaagagtccgttacttctaattcttgatgattagtcaaacacctaattatattatcatatgcataagttgctattaaccctaatttcacatcagttacacttacatgtttaggtaattttcagtgaagacacaaacataaatgaaaaaaaattcaaaccctagcgtagaactatattttatatatatttatgctcacctaacttgaatgaaaatgattcgtcggagctaggagtatcattttctccgtaaagacgttgtgggggtggtggaggtggtggaggtggaggaggagggggtggtggcgccaaaaaagtggctttatatgtcacatacagttcgaagagtaaa

SEQ ID NO: 26623 - DNA, 501 bp, Arabidopsis thaliana columbia
gaacgtttcttacccaaatatgtgttacatctcactttgatggacgcatataaatattacaatttgtttttcatttttttgtcacgctctctcttatctcaaacttcatttcgttataatttttcaacttctaaattatcttgtttacgacaaagtagagtttgtcattatctctaatcacttcaatactgtcaatctcagctccatcttcattcgtcaccatcgtctcacttccatcaaacccaaacttctctcctgtttttagcacatgcacaccaaaacccggttagctcaataaaccaaaaccaatttgaaccggtttaacaccatataacctaaaccgtaatttggtgtttaaactctagtcacttgtgtaatttgtatctttacctgcaattttcttgaggtcatcaagtgaaggaggaagaagaataagcttcccagcttcattgcaacttctttctctcctctccaatggatgtcctctgtaaatactcactc

SEQ ID NO: 26624 - DNA, 416 bp, Arabidopsis thaliana columbia
tgctttaatcatccattacatcttttatatttacttttataccatgttaataatcaagtgaccagagggtatcaaataagaaaggataaagagatgagaagatcataggaaacatacttcaggcactgtatacgtctttggttgccagcttcatcgtaatttttaaaagcctcaaagaagtctgtcgctgcttcttcccactgacgttctgccatgtgcatttttccaccacactcgcggattatacccatgatcctaggatgaggtatggcagacttgatggcaagtgccttatggtatagttgctgcatccattcaagagtgttgttgagtctcagtcacaaaagccagaagaaagtatgcagcaataaaattgcagaatcttcaaattggtaagaaaccatgtagcttatgac

SEQ ID NO: 26625 - DNA, 1223 bp, Arabidopsis thaliana
aaaaagtgttggaactaaatttttaaatagcaacctcatcagcaacaattgcatcactgctaccgtggcgtttcctacactcacagtaaaaaaacagtgattaaaacataacgcaccaccaccacagccccatacatacaaaccagcttccacccgtcccactcaccgacctccaccacgaccctgagctcaagtgagctagtcattgtcacatttaggatgtgaaagctaatttctctggtgcttcttttagctgaattggtttgtgcaggtttgcttcagatattgcaccaatgacctaataataataataaaaacataatacaccatcagtcgattccactcttttttctttcttgccgtcttacaacgaccttgtgattcctaggaacgtgaaggacattgagtaactacgaagcagtgaagacttatgggaagtagccaagctgcacaatagtgaaacctctttgcctgaggtaaaatctcatcttacctcccttataaactctccattcacttgattgctgaatttgtgtgacataatacaaatgctctgttcttctttgccgccagcatatggattcaaataaaatggttttcattgttagtccagaacatgatataactttaaaatgtaaattactgataaagtgatttgatagatgatcgtgagagatgaattgaatgcacatagatttttgtgttgttgtttcaagaattgtacgttgaaggggctggagttgagaaaatggtgtgaactcaacacaaacgcagagagtttctagacgcaatcccacggccgctccttgacttcgtggatagatgtttgaccgttaacccgaggcaacgaaccagcgcagaggatgttctcagacacgagttcttccatccagtacatgaaacccttagaaaccaaatgctccttaaacaatacagcaaatgcaatcgcagcctacagtggttgctgacgcagtaagccaaactttaaactaataatacaattattgaaaactaaaagagtaatttagcaaactagagagttagtgttaattagtattttcactgtattatttgaattaaaatcctcataatcgatatacttattctcctaatccatgtgcatgtatgtattgggaaacaagactttgatattaacaatcataagtacattcttacgataaactgtcttgtacaaggacaactgacaccacaaaatttgtgtg

SEQ ID NO: 26626 - DNA, 389 bp, Arabidopsis thaliana
tatacgaaatcatctcaacttctctttacttgaactcttcttagctgcatccataaccttctcaagatacccttcaataggcggtgtaagagtagccatacctcgattcgccggaaacggtgtcaaatcaggctctaacgccgccttcttcagattctccggcaatgcctcaatagcagatttcttcaaattcaaaagcgcagtttcagctgcacgacgctctctatgctctctcatcaacactttactatactccttcgcaagtctctctccatcttcttccgtaagcttatacttaggcaattcctcagcttcaaaaatccctaacgaaatgtaatccaaacctggcgtcccaattcgcatcggctcatcggtgaccccattgaagc

SEQ ID NO: 26627 - DNA, 394 bp, Arabidopsis thaliana columbia
ggaaccaatactagggacaggattgagcacagggttcacaagcgagtcatcgatcacttcagcaccccagacgatgttaagcaaatcacgtctatcaccattgagcccggagtagaggtcgaggtcactatagcagacacttagacacttggaccaaaaccgcttcaaaagagtgtatttaaacgattcaggacctacatttccgaaagcaaccatgtaactagggttttgatagttctgaggaggttttagtctatcgaatttatctcatccataagagaccttaatgaaccagttcaagaacttgcattcattcttaatttcaacatgatacactaaaaatgtggtaaaccgaaatagaactaagaatatggtacagttttaaacgaggaca

SEQ ID NO: 26628 - DNA, 552 bp, Arabidopsis thaliana columbia
  unsure (1)..(552): unsure at all n locations
nnnnnnnnnnnnnnnnnnnnnnntaaagtttatattcccgggaattcatcatgattatcaaaacgttaaaaatgagtgcacgaaagcgaaattgatgaaacgttcgctcactatttaccaggtaaatttatgggattgtagcgtaaaaaaagacaatttcgcagtcttgcgccgcattgattagtgcgtatgatagcgtcactggagttgcgctcttacccttatagccattaaccccaggaatccgcacatgcgtattgaagaagatctgaagttaggttttaaagacgttctcatccgccctaaacgctccactcttaaaagccgttccgatgttgaactggaacgtcaattcaccttcaaacattcaggtcagagctggtccggcgtgccgattatcgccgcaaatatggacaccgtaggcacattttctatggcctctgcgctggcttcttttgatattttgactgctgtgcataaacactattctgtcgaagagtggcaagcgtttatcaacaattcttccgctgatgtgctgaaacatgtgatggt

SEQ ID NO: 26629 - DNA, 551 bp, Arabidopsis thaliana columbia
tgtttctctgttcgagatgcaagttgattcatagaatgtaataatgcaggacagtccagtgataatagaatgctcagactttaactccaatggcaaacacagtctgattgggtaatcaacagcttagagctcagtccatcttctttttggagtgactttagctgttagctgacataattactcgtttattttgggtggtcaggaaagttcagaaatcgctttcagacttagaaaaacttcatttggcgggccaaggaatcaatttttctttgcctactggtgctggacaaaacaaggtataaaccaatacgaaaaggtctcctaacattttcatgcctttttcaataagctatctaataccatttatggtcattttaggtgttaaagagccaactttttgtggacaagtttaccgagactgtccaccacacattcctagagtacttggcatctggatttgagttaaactttatggtagcaatcgatttcacaggtatgtattgcaccactgtggaaaatcctaacactttgattgggtatgaatgttgttg

SEQ ID NO: 26630 - DNA, 353 bp, Arabidopsis thaliana columbia
cgaaccggccggcttgccagaacaccgtctacgggaggaaaggagatccttctcaaagcagtggcgttacatgccggtctatgcaatgccctgcattaagtcgccaaagacaacccgcgacaatccgactagcgccatgtcaagtctccggcggaatgcacctgagagtaaaaggaaaacccaccaggcgagccgggaaaaaacgcgcctcaccaaagagcagggaggccccggactcagggacatcgagagtctcaatcaagctctataggcaaagcaagcttggagacttctgcagcatcttggtcgtctctttgcaaggcatttcaaaagtagataccccgaagaagacg

SEQ ID NO: 26631 - DNA, 597 bp, Arabidopsis thaliana columbia
aggatcccctcggcaccaagaccgtgcatccccgagatgagaacattggaagcaaagagacgcctcatagtctcacgaccatagacggcgagctggcgactgtgcagatcttcatcaatctcctgacggttcgaattaccaaaagccatgtcgatttgctgaacgacgctatcgccgtgaaaacccctgctactaccagaagctaaaatcgaagaagacttatcagacgaagattcagtgaaatcgatacggcgtttcttagatgatgctaaatcggaaccgatgatggtattatcgttcttatcgttagcttcactagctcgcttgtgaagcataaagtgatgaaaaaacctggagaaaacatgtgaaattcccattagattagagaacactgaagagagaaaatccgatcagaattgaaatacctaaccctagattgattcttcggaagctatgagaaggaagataaaacgtacctttgaggaaagcagacgagagaagattggaatcggaaaagagaaaaagtttttgagatctgaaaattgagattgaagtgacgaattttgcagaaatctctaagatttatttaagagagac

SEQ ID NO: 26632 - DNA, 481 bp, Arabidopsis thaliana columbia
tgttacaaaggcggtcattaaccctggtgtgaccattggtgataacgtcgtggtagcctcaggtgcagttgtcacaaaagatgtcccggacaacgttgtcgtgggcggtaatccagccagaataattaaaaaattgtaatcggtttttcgcaactgttatgcaaaattgtggtagatctgttacttcccctctactatttccacgttaaaatagggtgttccctggaaagttgcagataccacgaaggcaaacgatgaccgaaatacaacgcctgctgaccgaaacgattgagtctctgaatacccgcgaaaaacgcgacaacaaaccccagctttagtatcagttttatccgtaaacatccggggctgtttatcggtatgtacgttgctttttatgccaccctggcggtgatgttgcagtccgaaacgctgtcaggctctgtctggctactggttgtactatttatcctgcttaatggtt

SEQ ID NO: 26633 - DNA, 560 bp, Arabidopsis thaliana columbia
cccaatacgacaaaacatatataaatgattaaactttttgcatccctattttcatagtcacatgtatatatataagatggaaacgtatttgttgtgcctcctcctacagagagagggttgaaggtgtttcattgcatgtggagttaaagaaaggttgcttatcgatgccgagtttctgggctaatgataggacagatatgattctaagaaatgtaattgcatttgagcagtgccagcatggcataataccctttacctcgcactacatacaattcttaaatgccctgatagtttccgacagagacgtcgagctactcagcgaaaaaggtacaaacatcactaaatcaatacatttaactattaattaacatatatgaatgaaaaatatgcatgtgttgctggaacataggggtggtaatgaacaatatgggtcggccaagcttggtggtggacatggtgaacaagttaaaggttggtgtgtacgaaggatacacctcccaatactatgacatagccatagatctcaaagctcactataaatctcgaagaaagaggtgttg

SEQ ID NO: 26634 - DNA, 492 bp, Arabidopsis thaliana columbia
ggaatctagctgctactttccagtttccttgagttattgtaaattttcccttaaattgaagctcattttgcttgtgtttttgtgtctcacttggatgatattttcttttctatctatctttacatactttgtaacttcactgtctattcctgattcagcagcctatccctttttcaggaaccaactcgacctgcaattccaatgttgttggctgtgggtgctgttcaccaacatctgatccagaacggtcttcggatgtcagcttcgataattgcagatacagctcagtgctttagtacacatcactttgcctgtttgattggatatggagcaaggtatcgacttttttcattgaatctttcattttgttaggctgtttcttatcgtaccaaagcaagtcatgtggaatttgtatgttgtttattgtctcttgcggttcttcatgccaaataatagcactctctataatagactcatgtttattttatgtag

SEQ ID NO: 26635 - DNA, 476 bp, Arabidopsis thaliana columbia
gctctgtatctgcaaacacaataaagaagatttaaggttcacaatggagaagactcaaagtaagaaacatatttcaatgtttttgtttaaagttcaagaaaccttgagtgcaaaatcgttgacgtctagaagaagtaacttggcatcgaagaaatgagctagggctttggctagcatttgttggtaaagctctgcaaggaaacatattaaaattcaaaacacaaacgaattggttcaagatcaagatcgaatcatcggaatctaaccggcaggccgactaagagaatggctcggctagctggagacaagtttctcgtatattttgaagcatcgaagtgcttcaaatggacataagctgcacttgttagaagcactcgtgtttgttcactgcacaatcccaaaaaggtagaaacattgatgaacaagactacatgtactatgtatcgatcggtgtgggtatgttcagtgatcaaaag

SEQ ID NO: 26636 - DNA, 484 bp, Arabidopsis thaliana columbia
gaagcgtatgattaaactcaagcttctgagttttcaagggatctcaagaattgaacgacttgacgatgctgtctgcaagcttcgtgacctgatcatcttggacctcagagcttgctataatctggagaaacttccagacaagatagattcactcaaggcgcttatctacttggacattacagattgctacatgatagatcgcatgcccaagaggttgtcatggcttgatagcttagaggttctcaagggctttattgtcagtgatgctacagatgaagagacggactgcacactggctgagttggtgcacttgaagaagctgagacagctaagtatttccataaacaaagaaaatttcagcatagatgatgtgtgcgcggctgtaaagagtttcccgaaactggcaacgttgaaggttgcgtgtggaggtatcaatacacatcctcagggcaaaggcgtagatcgcgaaaagggggacgagaat

SEQ ID NO: 26637 - DNA, 578 bp, Arabidopsis thaliana columbia
atggttgatcaggtagaactgcttttaagagtccaccatacaaacttggtaaatcttgttggatattgtaatgaagaagaccacttggcccttgtctatgagtatgcagctaacggggacttaaagcaacatctttcaggtaaatatgtattcaaccaaattgtttagaaaaagataatgatcctttgtcagattttgatggtactatacatattttcatattacactggtttacaagaatttgacattaataacgcggaacaggagagtctagttccgctgctttaaattgggcaagcagacttggaatcgctaccgagactgcacaaggtatatgctactttttgctaaggagttacttttttcttttatttttaacgcaaagagctaaaattgttgttcaaatggattttaacacaacaggattagagtacttacacattggatgtgaactccaatgattcatagagatgtcaaaacgacgaatatacttttggacgagcatttccatgctaaacttgctgattttggacttccagatcattccagtaggagttgaatccatgtacaacaaatgt

SEQ ID NO: 26638 - DNA, 588 bp, Arabidopsis thaliana columbia
gtttgtcccaagtactgtgggaaagattgattatataggctctaaattcgaatttatgcatgtatttttcttaaaacacgagcagctaaaactctaaagtatgttattttatcttgttacaacagctcatacaggttggttcaattttggatctggttgttgtttgaaatcgtctactaatcataaaagctgttacaaataagcaaatgaaatatagagaacaatggtacattgcaaatgcaacacagtataatacaatcattaatcctaaacccttttttggtaaaaaggaaagacatgtcaacgaagtaacccgttttgtctacttttgtattgcctctctagatttctctactgatacagtttataaccaaaggaacaacaaacacaatcaacttcaaagggtgttagtgtgtttatctgcttgctcctccttaaggacttatctccatcttatcaaccaaagtagagagctcttccttgagctcggtgttgcgagtctcacacacagaagtcatgcatcattactaattcttcaggtgtcgccttcttcacagtcacgcagaagccttgtgtcccggccaaaga

SEQ ID NO: 26639 - DNA, 590 bp, Arabidopsis thaliana
ctgatactatgcaatttgtgcgacccgatgtacagacaatatgcatgggattggccgcttcaatagcatcctttatcctagtcggaggagcaattaccaaacgtatagcattccctcacgcttggcgccaatgagtttttttattttcgagaaaaaaatactatgccttcgccatttgaaatatgaattagttaagtaataatagcatggcacttcgaattcaatatgaaattttttagattaaaaaaaaattcgattatatattgaaagagtagtatgagataaggaagaggtttttcaaatgatatcttacctattcgggcacatttcagcgtcacaaactttgttttcacaccgtaaaaaaaaaaaaagacactttgggattgctgaatcatcgacgaatcaaaacaatgatatataaagcaacggaaccatcatagtatttttttaactcctacaaaaaaaagaaggatggtaattggatgatttaaggaaaggtcaaaaaagtcaattccattgtggagccgtatgcaatgcacaaaaaaagcctgtacggttattcaaatttatctatttttttttttttgtta

SEQ ID NO: 26640 - DNA, 837 bp, Arabidopsis thaliana
gggccttatgcaagtttatttagataaatctagatgcaagaccagtttgaattagtttggtgttatcatgcaaatactgaaatatctcccatctaaagtttggtccatgacaagtatatcatcttccacaggtatgagaaggatatgctggctttcacaggctgcagtcatagtttgacagctgaagaagacgaagaattacgacagatgcggtatgaggttagtcactggaaggaaaaagaaataaatggaacagagagaagattgcaaggtggttgtccgttgactccaagggaaacctcgcttttactgagggctttggaattcccatccagctcccggatatacctcgtagctggtgaagcatatggaaatggaagcatggatcctctcaacacagacttccccaacattttctcacattcaattcttgccaccaaagaagagctgagtccttttaacaaccaccagaatatgttggctggtttagattatatcgttgcacttcagagtgaggtatttctctacacatatgatgggaacatggcaaaagcagttcaaggtcacaggcgattcgaagacttcaagaaaacaataaatccagacaagtaaatgctcctcccgaatacccaactcaactagtttgtagtaaatagttatcattttggtcacatcttctttttcgatgcaggatgaactttgtgaaacttgttgatgcattagatgagggaagaatttcatggaaaaagttcagttccaaagtgagaaagctacataaagaccgaaacggagctccatataatagagagtcgggagagttccgaagctggaagagag

SEQ ID NO: 26641 - DNA, 155 bp, Arabidopsis thaliana columbia
gatgtctttgtacattacatcttccctgaacacgacgtttctgcttatagagcacttctcctcatcaatcatccagactctgaatccctttactccctgtggatatcccaaaaacacacctttcttagcccttggatctaatttttcttcttgag

SEQ ID NO: 26642 - DNA, 587 bp, Arabidopsis thaliana columbia
  unsure (1)..(587): unsure at all n locations
nnnnnnnnnnnnnnnnnnnnnnctaaagaacctctgcactttaggggcgtttaacgtcaagctcgccatccaggtctattacacccagtacgtgcttaacgatcccatcctgttgtcgtatatgggatttttcagcatgggctgtattttcatcggcgtattcctgatgcctgcctcagtcagacgttttggcaagaagaaagtttatatcggcggcctgctgatttgggtgctgggcgatctgctcaactatttcttcggcggcggttcggtcagcttcgtggcgttctcctgcctggcgttctttggctcagcgtttgttaacagcctgaactgggcgctggtttccgacaccgtcgagtacggcgagtggcgcaccggcgtgcgttcggaaggaacggtctacaccggttttaccttctttcgcaaagtgtctcaggcgctggctggtttctccccggctggatgctgacgcaaattggctatgtgccgaacgtcgcacaggctgaccacaccattgaagggtacgccagttgatcttcatctacccaagcgcacttgcggtagtcaccattgtggcgatgggt

SEQ ID NO: 26643 - DNA, 592 bp, Arabidopsis thaliana columbia
tccgaatccaagtatatgacacggttaacacaaggctccagcagatccgctaagtagcttctagcgtagttcagaggctgctcgagagcttgtctcacggaagaagaaatcaaaccacgaactgtctcaggggcaaaatcgtaaatattgaatttcagtctcgggaaaaccgatctcaccagcgactccaacaggtttgtttcctcggagacggcgatgaagtggaagaagacgctctctggacacaccgagtgctgaaggatcgagttaacggctgcgattgagccacgcaggtactctacgtctaacgtgatcgccacgtggaccaacgacggattgcagacgccgccggaggagagacattcgtcgccgttgttgaacaccgctggagcttttctgaagatcggtgatggagaagaacggattgccgccgccggaggaaatgactgaagcgacggagataacacgatcactgccatcgcggcggagaataatccagcaaatctcgttatcaaagcatttcgaaaaaagaacaacgaaccctagaaataccagaagagatttttcttggagagatagagaagagaggaga

SEQ ID NO: 26644 - DNA, 618 bp, Arabidopsis thaliana columbia
tccaacctccaacaaagcctaatgctctcgattccctacagagtactttctcaatgctaccttcaggaaatcagcttcagcagccaaggccagcagcaagctcacagcctgcagtgtcctcacaaggtccatcctccggtttgccacctggaagtgcagttggatctggccattctactcctgctggaaataatcagcctccgtggccaaaaatgaaaccatccgatgttcagaaatacacaaaggtatttatggaagttgatagtgacaaggatggaaaaatcactggtgagcaggcgaggaatctatttttaagctggaggttacccaggggtaaggattttcaatctcgcagtctactttacataaagaacataattatactgttaatatatgaaatgaactgttacctccgttgtaattagatgcaattctggattgaagaatccttttagaactttttttcgtctcctttcttcatgggacagaccatgtgctgttatgttaaatatatttgctacctcctgagggttatgtcctttaataacatatgcaactgataaagctatgaagtgcttatgcgtacattttccttttacttggtcccagaggtattga

SEQ ID NO: 26645 - DNA, 577 bp, Arabidopsis thaliana columbia
ggttagggttctgtttttaaatcatccggtttaattggttgggttaattggaaaccctaaagtgtgcctataaaagaaggaaactcgaacttagggttttagttagccacttttcgttttataaaggagaaaaagagagaaaaggagaaggagcagaatcgttagggtttgggagtaatcagtttcgtcatatcaaatcgtggtaaaaggtaacgaaatttggtagagttattcccaagtcctttatcgttattctccagtttacagaattgaatttggattaaaattggttgagttattcgcagtttcctgagacacgttttctctagacgcgaattaggaccagcgaagattgagactgagatcgtggtctcggctggattccgatcggcactagattttgtgggctagctttgtgacagtctgcagctaggattgcaccggagcgattgcatagttaacggttagctctgctaatataactttatcaatgtgctctgcattggtcaacttacgctttgaattcagccacattagtctatgagcatgaggcagtcatctattttgaaactttata

SEQ ID NO: 26646 - DNA, 555 bp, Arabidopsis thaliana columbia
tctctcatatcatgatctttcactatatggatcttataaggaaaccctaactccttcaacggtttagctagatccgcaacttttgttgaagtaaaagcatcaaaatcctcttgactaggttgaggttgagcgtttggatcttcaatttgagttttcagagggagaggtccccaatcggcaccgaagaggacggaggttggagaaacgtggagaagaacaacggcgtctccgggacggatgtagtgatctacagcccaacgaacggcgaaagagctttcttcggagagatcaactgcgactccgattttacgacgagctccggcggttggtgttggagttgcggcggaggagggagtagatgaggagtggtgatggtgagagtgacgtggagatggagggtgatggatcttgatgtctggaagctgtggatgatcggaatctgctggattcatgatttttttcagatgttgtttttgttcgtccgaaagtgggagtgaaggaggtttctcttaacgggagaagaagaagccgttgttttgtttttttaatagacca

SEQ ID NO: 26647 - DNA, 519 bp, Arabidopsis thaliana columbia
cgccgccgtcggtgtccgcggtaccgacaccgttgtcctcgccgtcgagaagaagtccacccccaagcttcaggattctaggttttatttccatctcttcacttttatcatggcaccaattaacagacttgccctctctacttattggatcctgcttggtttactctcagttgctagttgactgaacaatgttgatacgactgctttattttggtcttgttccctatttaatggaatctgcagctgaaacccttgtttaaaattgaaccttgttcctaattgcgattgtctcagttgttactcttttctaacatgtatgatggctttggccttccctgaaaagaaatctacttaattgttcaattctcttatactgctgcctaaccaatatattttggagaggtatttgtgtttctctatctagtttgttagatgaagctgatgtcctgtgcttgtttctgacagatcagccagaaaaattgtgagccttgacaatcacattgccttggcatgcgcggg

SEQ ID NO: 26648 - DNA, 262 bp, Arabidopsis thaliana columbia
aaaccaattgagtccaatatacgatgtcgctgctatactaacctccattcatgtatatatacaagaaatgtcatatcgaaatgcttctcagtaaaaccgttgatgattgttgttattctgcatcctcccctgatcttttacacggatctttgatctaatctgattacattagtggctaaacaatcgccgtccttttaaaatcacagtcattgctatgtaatcctaatccgaatactcctgcaaatacggtaactgcacgaat

SEQ ID NO: 26649 - DNA, 585 bp, Arabidopsis thaliana columbia
  unsure (1)..(585): unsure at all n locations
nnnnnnnnnnnnnnnnnnnnnnctaaagtttcaggaagtctttattttaaaaggccgtgaagataaacgtctgttaccgctgattcacgcccttgagtctcagggcgtggttatccagttggcaaaccgccaatatctcgacgagaaaagcgacggtgccgtgcatcagggcattatcgcccgcgtgaagccaggacgtcagtatcaggaaaacgatctgccggatctgatcgcttcgctcgatcaaccgttcctgctgatcctcgacggcgtaaccgatccgcacaacctcggcgcgtgcctgcgtagtgcggacgcgcaggtcgaatgtcggtgattgtgccgaaagatcgctccgcacagctcaacgctacggcgaaaaaagtagcctgcgggcnggcagaaagcgttccgctgattcgggtgactaaccttgcgcgcaccatgcgtatgttgcaggaagagaatatctggatcgtcggtacggcaggcgaggcggatcatacactctatcagagcagaatgaccggacgcctggcgctggtgatgggtgcggaaggtgaaggtatgcgtcgcctgactcgt

SEQ ID NO: 26650 - DNA, 508 bp, Arabidopsis thaliana columbia
ggacttttcgattacttgattgcaacggatgataatagccagactaaaaaacaaaaggaagaggctaaaggtgaggctaacaaggagaacaagaaaaataataagcgtacaaaccaaagctagatgctgagttcggtgtagttaggggaattgatttcaaaaaagttcacacggtatgctacttgacttttgctaagggggttttcatttctttgtttttgtactctttgctgcttgggatattgtaagaatccttcttttctttgctctatactcttaaccttcccttaaaccttttttatgcacaggttataaactttgatatgcctcaaagtgttactggatatatccatcgaattgggcgtacagggagagcatatagcagcggatcttccgtttctcttgtgagtttctcgtctaataatactgctgtctggcatgatctctttaaattttgcaagtctaatgctctgctttatttggcacagatttctcctgatgagatgga

SEQ ID NO: 26651 - DNA, 269 bp, Arabidopsis thaliana columbia
tcaaaagagtgaaataaaaatctgtagcatagaaaacctgcttcaagtagacagcacgttctccaatgtaagtatacagccgggtttcaaactcctcctcctctggtagtatagatccagacgcaacatgaacctgtagtagtataatgcaaagcttgaagtgagacaagactttgtcagattcaggacctcgaacatgacgatagcggacagatcggtctgcatgagcagaatcaagttcaactgtatggacagccgcggaaccagct

SEQ ID NO: 26652 - DNA, 581 bp, Arabidopsis thaliana columbia
  unsure (1)..(581): unsure at all n locations
nnnnnnnnnnnnnnnnnnnnnnctaaaggcagaccgccgagaaacgcaggcattttaccttgcgaaaggaaacgcgtggcgctttcagaaaaaccgtgagtggtcgggcaactcaattgcgcctggaagatggtcagtgcgccgctgacggtttgaccgcagacttcctgcgtgccgcctgcgtcggtaaagcgaattaatgccaccagaatgtgatgcagaccaaacggcaacagcagacgttcaccggtaccaaacagcatcggtccgaaatcacccgcgctgtttatcatatggcccaagccgctaatacccatggcgaaaatcggccagactaatggaatcaccaggccgacaaggccatcaccagcgaggagataattggtacgaagcgcgtaccgctgaagaatgccagcgcatccggcaggcggatattatggaaacgctcatgcagcatccagacgataataccggcgatcaccgcaccgaggatcccggtatcgatcgactggatccaagaatgctctggatgttattggctttcagaacgcggcatccgtggttggcagaatgctttattg

SEQ ID NO: 26653 - DNA, 589 bp, Arabidopsis thaliana columbia
gcttttggagagattaactgtgatattatgtacaagagatcagagaacacacttacttgatttttgtatatgagatatgcaaggaaaaagtatatcagcaaaaacggcagtatcagtggtgctatgactgaattggtgaaacccaggagcccaaacaaaagcagccgaggaatttcggtgtggttatggaacctaagtgtttcatatgactcatcctcgttcttggtacaacttttgctaccagattccagataagagccataggctgcattatttcacaagccaaactggcccaaccagatgtgaaacaataggtcatgaagaagccagcctgcatacatggttaaagccatattcaaaatcaatgatacaattttcatttttcctaataaatatgaaacacaagcaaccagaaaagctcaatcccaaataattcctccaatgggctttaatatctctgatatataattttatcatggaacgaggaaaaagaacaaactattaaagttccagcgcaagaaaacactatatccaatccgaaagctgcaagatcttggcaaaatgtaacctagctaatgttcagagactg

SEQ ID NO: 26654 - DNA, 599 bp, Arabidopsis thaliana columbia
catttctaatgtaataggaacatataaatacaaaggttaacagcgaaaagcgtgcacttactcgtcagttcttgtcctaatcttttgcaataagacgcgattatcatcctcaacatgtctgatgagctcatcaataaacaggcgtctatcaagatcctcaagtttagaaacatccatgactcgtctctggcttctcttcccttgttcatctcttttgcagaacaaagcagtagtgattcttttacatgttggtgatctctcaatagcaacccattgagaccgaacctgatcaccatccccattttcaagattgttcctagaagcaaactcaactccatctgtttgaggcattgtcattattagaaaccaagttccaaaacggattgttctttataacgaagaaaagagaagagagtcatcttatatataagtagagaagtagtgttgctagcttacaaataattgatcactagcaagttggcttcacgaggtggatagagaagtcaacagttttaatatcaagcatagacccactgtagtataacagacaaaacaagataatcaatacacaaatgggagatcttgagacagtataggtg

SEQ ID NO: 26655 - DNA, 580 bp, Arabidopsis thaliana columbia
ttctcatccatttccaccttatcaaatacacccacagaactcatggttgcaacaatggggatttggatttttgtaatactctttttctccttctcttcttttgcatatatattacataagcaataattagttgatcttgaatataaaacttgggaatacagctaagagtggtctttttatattatatcttatggaagagttggtaaataattgacttcgagtgacaggcaaatgaaaagaataatctgtttttttggatgagttcgaatcgcggtacagtcttcaatgtcccattgatgggtaattattaaccaatcttaggttagtttattaacgaagtggtaacttagacgtggccgtatcttccggatcttgtccctaaagtttagttttatatactattagtaagcaaacttaggttcatataattgaggtcttttcttttcttgtatgcaatagtagtctagtaggtaaaagaagagtaaaccacaataccttttgttcattaaaaccttcggttgggagcctaaagtaattgttttgacagctatagggaatatgatgcaaatgaaaattttgt

SEQ ID NO: 26656 - DNA, 348 bp, Arabidopsis thaliana columbia
cacccgccgagaaagaaaacacacgggacggcaaggattccctcaaagccacaaggccaccgtccaccgacggacacagtcgcgaagccgtcctcgaagactcagaccactctgtcaaccctgcatccatcgtctccggggaccacgcacgattccacacacgctcacctcaacaaatcacgcgcaaatcacacagcatcaatgaaactccactaaactccgtcttcgcgtctacagcgcatcacgctaacttcgagccagaagacctccaactcagtcacctcatcatctaagcgcgcccatgccacaaagccgccagactcggaacaatcatccagttccaaaaag

SEQ ID NO: 26657 - DNA, 463 bp, Arabidopsis thaliana columbia
cgatcatcggatttattatggtatcagagccatacaatcgattctcccgcttactctttcgtcggagatgagcttgttcttagcttcattgtgtttttcgatttgcgatctttcactttgaagatttgcaatttcgttctttggttcgccggaatcttgcttttccgttctgttttctttttatttctcttcattttgacctcctgtgttgacgattctagctttctttacacaaattcatcacacatttctttgtaatttcttgttcttacactgagaatgggatattatgctcctccatcgattccagtgactcgacctccgatttcgtcgaatggtactgaacaacctcgttttcaaacggatcagtatgataatccgtattatcttcatagtgcagatcacgcaggacttgttcttgtgtcagatcgattaacatcttcttcagattttttgtcatggc

SEQ ID NO: 26658 - DNA, 800 bp, Arabidopsis thaliana
ctatgtcacaacaatgtcttagctcaataagttaagagtatcttctttattttgagatatctccataagtttcagtaaacagtgcagataatctagtttatatggtatgagctcatatagttttatatgttgaacagattgtcatgttaactgggaaattatcatagatattatgaggattttgctgtgtcttagtgtcagattttgttctggttcgttttgtttgtttgcctttaacttgtgatccagaatgttgactaaatacagacggttgtgtctaaattctgaatgttaacacttgtgcagatagatttcttcgcgatgtatcgatagctgatgataatcagtatgaagatgagagattaaacaagtgtcaagctgttgtttgctggaatccgtctcagtctacttactcacagtccataggaaccttccaacaaccgcggacactagagattactgagttggatgagacaggtgaggatgtggtaatggatgatgcatccaatgagatagaagaggatactggaagcaccagtctatctttccctcagcaaggacagcagcaagagcaagagcacacctatggttttggcttgcatccgtggcagcaagcgcaaaactgtatgattccgcagcttcctcaagtcagtactactcccactcccatcacttggttccgatgatacggcttaaccacgggaaaactgaatagggaatgcacgaagcaggatagtagaaggcagatttgttgttagtttttgtatctgcctgttgcgcagattagagatatggcatag

SEQ ID NO: 26659 - DNA, 626 bp, Arabidopsis thaliana
  unsure (1)..(626): unsure at all n locations
cccgggtaccgagctcgagttcgattgctgattttgcgtaaagaggatgcgagtgcatcctctgggcaaagcgagttatcgcttgtgcagatgggattaaagcaggtagtcgccagcagcttctggctggtattcgagttccagcacttcaaggtgggttgcaacgccgcccggaagttcccagtgaatggaatcgccaacgcgcagcccagcagtgcggcacctaccggagccataacggaaagctgagtattgctatcggtcatttttgccggatacaccagcgtgcgcacacgcacttcgccatcgctaagattgcggaatttaacccggctgttcattgtcaccacgtcgtgtggcatctcttctggcgaacacatttgggcgcgatccaactctgcgtttaacgcgtcggcgattggcaaaccagcataggcgggttgctccagcagaatatcgatgcgttcggcatccaggtcgttaatgatgatagttggtctggacatttttactccatgtcgtcggtgctgcgagtgtccagataaacataccaaaagaaaacctcaccgtcagcggcgagggtttactcacatgatgatactgctgttgncactctttgaagtgat

SEQ ID NO: 26660 - DNA, 592 bp, Arabidopsis thaliana columbia
ttctgcaatttctccgccatttgaattgtgtttcattcaagaagtcaatgatatgtgcaggaagttcgtcgagtagtgattcgagttgtctgcccaatctatgcctctccacttctgtcataagtggcttcaccggttctggaacactctctctaacgggtgaagccatctttctcttcttcgccggaggtacagatatagcagctttcctttcatcattgggctccaatgttactgcaggcaacgtttgcatgctacaaggtggtaatttctttttgatagttttccaccgcgcttcaaataatttactaaggatatcccacataatgtgaacatcatgtcctggagggttatatgtcatcgcattggtaaatgtaagcctcacatcagcagcaaactcatgtgggcttgagtatacaccagacgctaagttcttctttactgtccctaagtccatgggatgcttgatagtagtgagatagtcaggtatgttcagtttcacgtcatcaactggcgcctgaaacacccaagaatgcggatgagaccacagttttctcagtagcgtgcacattgcttcatcagtgtaatgtta

SEQ ID NO: 26661 - DNA, 1371 bp, Arabidopsis thaliana
taatgttacactcaacttgttatttttatctgattatattcgtttatctttaaccaaatattatattccatttttaatttttggaaccatattcacattcggttaaattttcgtaatagtagattccataatagtttcagaaaatagattttaacaaaaaagtaaaaaaaaggatgtacctgttttatattttcaatagtttgatatggcaaaatattctttttatcagtggaaaactaaataagaaagtttttttttcttaggaaaatagaaaaaaaatattcctttcctattatagaatcattattctaatatttatgatattttttttgcagaaaacggttctaaaggcaaactagggaaggctgctcacttggaggattggatcacaacaatcacgtcgttaaccgcaggcgaatccgctttcaaggtcacgttcgattacgaaaccgatttcggttaccctggagcattcttgatcagaaacagccatttcagtgagtttcttctcaaaagtctcacacttgaagacgttccaggccatggcagagtccattacatctgtaattcttggatttaccctgctaaacactacactacagaccgagtcttcttctccaacaaggtaactactggcttctctatttcttttcttgactaatattagtcgaaagatgttttcttgataacgtttgacacaatatatgtttacttgtgtttcagacttatcttccacatgaaacaccagcgacgctgctcaagtatagagaagaagagctagtgagtttgagaggaaccggcgaaggagagcttaaggaatgggacagagtatatgactatgcttactacaatgatttaggcgtcccaccaaagaacccacggcctgtacttggagggacacaggagtatccttacccaagaagaggaagaaccgggcggaaaccaactaaagaagatcctcaaaccgagagcaggctaccgatcacatcgagcctagacatatatgttccacgagatgagagatttggacacttgaagatgtctgatttccttgcttatgctctaaaagcgattgctcagttcatccaacctgcacttgaggctgtattcgacgatactcctaaagagtttgattcttttgaagatgttcttaagatctatgaagaaggaatcgatctaccaaaccaagctttgattgatagtatcgttaagaatataccgcttgagatgttaaaggagatattcagaacagatggccagaaattccttaagtttccagtgcctcaggtcatcaaaggtatactaatagtaattaacaacttagtcatctgctgcaatcggaatagcgtttttgatgtacgaatttgtgtg

SEQ ID NO: 26662 - DNA, 528 bp, Arabidopsis thaliana columbia
cacaaaggtctcgcctttaaagagaaagagacctacccacttaaatatccctgacctcaatcctcaacaaccgatttcaactgattacttccgtttcagagagggtgacgcaaaggtctcgcctttaaagagaaagagacctgcccacctaaatatccctgacctcaatcctcaacaaccgattcgaactgattacttcagtttcacagactttgctcaccaaaacggcaccgtaagcttcggtggcaatggttttggtgtcgtctccagaaacggtaagaagaagtttatggaagatactcacagaattgttccttgtttggttggtaactccaaaaaggtatctttttttcttcctcttcattgaattaataggtttgagatcttaagtgtgttttgtggttgatgggtttgggattgatttttgtagagtttctttggagtttatgatggtcatggaggtgctaaagctgcagaatctgtggctgagaatttgcacaaatatgttgttgagatgatggagaattg

SEQ ID NO: 26663 - DNA, 801 bp, Arabidopsis thaliana
tgtctcatagccatcaaaatctctatatataactcataatcacaaacgggtcttcctgctaatggttctaacagaagcccttttcaactaacgaaaaattaccaaactcttcatctgaaccactccactctttttagcaatgactgacaaccacattcagacaaaaacacaaataacatagcatttgtaaaagcccatacttagatcccaggaaaagttaattacatgtttccatgaagctgctccatttgagctccccacccgccaatcttttgcaaagcaactccttgatatctagaattattccttgagaaaccagagctctgtcgccgaagtacttgcacaacttcctctttggaaagattcgccatctgtaaaagtttgaaaaccagataagaacaaatcaaagcgtacatgtcttcatttgtacatctgtaatcaaaacctgcttgagatcctcttcataatcgccaataacgaaattgatgtcagcttccagaccccggaatttgacagcagctcgatcatacgccctacaccaacgaaagttgaacttaggaaacaattgtatcataacgaaaaaacagttgagtgatcaataagatcaaacaaaaaaatatcatttccaaaggcattacctagctgcagcatgggcagtatcaaatccacctattgaattcaaaagttaaagcttttattagagaactaagatcccagcagaaatcagttcacagtagtacagccattagaatccatcctaaataaacttgtttacagcaatccctgcaacgatgaaaattg

SEQ ID NO: 26664 - DNA, 540 bp, Arabidopsis thaliana columbia
cagacaaattttagtcttcaaaagagaactattctcactccctccaattgatgaagagatcggaacttcactaacctaaatgctccaacgcgagaatcgcttgcttcactaatttggaccatcaccatggccatggcaatcagagcaccttgacgaacaaagtctacaacatctgatgtaagtggctccaacaaagatatcgcctcactcagaccagtgcctgcacaagagatgccaactgcaagagctgcgccatagcggacatgtggattgtacgactcggaaagaagggatacaatacggggagtctacagtttaaatattgagccaccagttaatgactgtaagcgagcacaagagccctaaaggcactaaagaaatggaatatagtgtcaagaagttaatgagacaacaagaatatggagttacctgctctggatcagagtataagacaaatccaagtgcaagaacagcagtcctcctaacatcgtcactgacatcagacacagcaaagtgaagaagttggcggatggctttgtt

SEQ ID NO: 26665 - DNA, 374 bp, Arabidopsis thaliana columbia
gcattagtaaccaatgataaattaatagtggttaataatcccatcaagtaataaaagatgcctccttcaatgttgatatctccagtagtcactaaccaattgatcaagggtagcaatatttagtaattctaggactaaatcttcttttgtgaaaatgggcatagatacaactcatcttgcaagtcttgcatatcaagtttttaacgcttttctcagattgtctatataccttagctaccacgcagagaagctcttcatgagatatgactgaaggtttccggtacagccgatacagctccgccccagaacctccataaggtagccaatcagcagtagctaagttgacggcctctgcacaatttagacctggaaga

SEQ ID NO: 26666 - DNA, 577 bp, Arabidopsis thaliana columbia
agaagaacagagacagatgcgtcgaaagcagaggaaagagacaaaacattgttgtcgaatttggataggtaacagattacatcagccatacagatcttacccaaacactcacacttatcattatcatctgttttctcatcgtgattacagctccatacggtgaggaacggttcgtcagaggatttgagagcggcgatggcgtcagtacggtggctgtggcgacggagagacaccgtaaaggtggcttaccgatacagaggtcagataattcgtgagacaaaagggttaatgccataaaagaagaatttttttttttttttttgcagagaatgtgaaggagaagatggagagagaagacagaggaagaagtggttataaaggagaagagagatgggtacggtgttaaagtacataaacacaaaactacttggtctagggttgtgtacagatagattttttttacctttttgtttttttgtgtttattacaggtagattttttgttttactataatgtttaggaatttaattaatatgctgactaagaaaacttttgtgatttatttgttaactatgat

SEQ ID NO: 26667 - DNA, 529 bp, Arabidopsis thaliana columbia
  unsure (1)..(529): unsure at all n locations
gttctggatcaagtgaaagacccatgttttcttgcttcaggtattatgtcggttcacacatattcccagatgttttactcaatgatattgctggacctgatggagatgctttggccttaagcttaaaactggctgtggatgtcttggtgagtgagacatgcatctcaaagctatatctttcatgtgaaaatatcatggactagccggacttaacgagggaggaaaatggtgattgtggggaaaatgtgaattcacgaagtganatgtaggattaaattcgggtagaaagaaattttggagaaagaaaatattgagcagataatcaactcgtttttttgtgtgtatcaggtagtttcctgcccctgtgcactgggccttgcaacaccaactgccatattaattggcacctctcttggtatgttatcagcgtattatttctcttccgcataaaaatctgcaaacgtagctgagaagagtacctaatttgcgtcaaagtttccaattattaggaagattcgaactgacactg

SEQ ID NO: 26668 - DNA, 535 bp, Arabidopsis thaliana columbia
tacttgttcaatgtcgacgaacccgtgcacgaccccaacagctatcctgagacctttttcatatcctgtgtcgaggaacctcatgggcttccatataaatggagggatcatgaatctaaacagtgtagactctgttgcttcttcaaaagctttagcaaatggaacttggggaagatcaacagctagagtttccgggtcagcacctagacccgcaaggcagatgatgtcaaacgtcaagcgcaggaacacgtcttggagatcgaaagcttcttgtgactttgcgaaactctccatcaccttcaacagcttcttccttaccaaatgttgtgttgtctgaaaggaatgctctacaaacccggttgaatgcatttcggttatgatgatccgtcgttgctccttccaagaatcatcatcagcattaaagataccttcctcgagcagatcattgaaccggcttttaaagaaggtaccttttgggaagttcttgaagttagtcttgagcatgtactcgacatttgcaggaacacaagtcaca

SEQ ID NO: 26669 - DNA, 545 bp, Arabidopsis thaliana columbia
ccagaggatattttaaagcatttttcaatgtctccgaggagaaagaagtcgctaggatccaagattgcaggtacctctccaagatcaatgagggcacaactccaaacaagaaagctagatctaaaagaagggtgtaagagaaagctcatgttcaacggtcctggatcaaattcaaaaccaacaagaatcccagaactaaacagaacaatcagcaatagcagcaacaatagtagcatgaagaaaaccgagatcagcaagaaccaacaacctataaggaacagtgtgaagagaaacaaaagtttaccgtcgaggttgagaaaatcgagcaaaatatcttcaaaggtggtacctattgaagctgcggaagagagtggagaaatagttaaagagcaaaaaacacctaagaagctcatcatgacccgcaagtccaggacattcttagaagatgactttgctttaatgaatgatttctctatagaaaaggcggtcgggctttgcgagtttaagggaagagaaggcatagattcagattttcacactgatgg

SEQ ID NO: 26670 - DNA, 509 bp, Arabidopsis thaliana columbia
tccaaactcattaagctcatgtaacaggtttggtacattgatgccaactccaagactgttctatccaaagatcatgtcggaaaactttattctggggactgctatctggtcctttatacctaccattctggtgaaaggaaagaagactacttcttgtgctgttggtttggaaagaatagtaatcaggtaatcacgtgaaaaggtgcatctttgatatttttgttcatataaaaaggaagtccctatttcttctgttagtattttcagctcttttaataactggaaagaggatagtaagacataatgtattgacaaagccggcatgtttagcttcttcctggtttgtcttgtaagacattttataagtaagattgaaacttggttgggtctataagatgtttcaaaattcatatttgtaaatgtgctgcagttttactctttagctattgagggatgctgttagtattgtagtttattgttatgagttgttgctctcaacttttgacgtg

SEQ ID NO: 26671 - DNA, 579 bp, Arabidopsis thaliana columbia
tcgaccattcagctggatcccattttcaaactcagttcaacctagacgagaaagcagccatcattgagaggatggtaaaacgattaaagtcagcaccattaccttcacgtgctcttccatggatattcaggaaagcatggatagaaagatacaattctcttgcagagaagaagcttgatgaaatggaagcggtgatgcctctaatagaagttctcaacctgatcctggatcctcacaaagatgtgagaaagtcaattttggaaaggatcaagatttatcaagattcagaagacgaatgtgatgttaatccgtctagggccactgttaagaggagtgttcaagaaaaactggaagatcatggaactttcactctaccatgttccattggtcaattggtttttagcaattgtctatgtgattagggagctttagtaagcttaatgccttgcgacctgactttgatccttgctaataggtctgcaaggaaacccctttgcctgttacgagatctgccagtaatgattaatgtagtggaagtactacagatttcgttgtgcttgagacggaagtagacctaag

SEQ ID NO: 26672 - DNA, 731 bp, Arabidopsis thaliana
aacgtccgccagtgtgctctaaagaggaatggaatgaagaatgtcaggccacagtaaaccgcgtaaacgaagaagacgttaaaagcgataaccagatagttttgtctttcagcaccgaggtcatactggtgtttttcgatgctccgtcttcttttttcacctcaacggacggtgcctcttctttgtcattcaggacaaagaaaataataatgcctacggcaatcacaataagggaatagaaccagatgcctgctttaaaacctaataagccactgccaaaccaggtaaatactgccaacgcagaaaatgccaccacggtatcgacaatgccacgccctgtttcgaagaagccaaacaaccgaccttgttgttcgctattgcccaatcgacttaccgacttgagcaagaccggccagttcatcatgtcgcaagtaacgccaaatagcgcccagacaaagaggatgccccaataccccggcattgtcgtcaaataaacacccagtaatcctgtcgcaatgagtgagaatgacatggtgtatctgcgcggtagtttatcggcaaaataaatagacagaaaaaagcccactgtggtgacaaatgagtttaccgacatagcattaccaatttgaccattggtcaaatggaaatattcctgcatcgggatataaaacgcatctttcagcgacggtaatttataaattgtaccgccacacagtgttaatagactaaat

SEQ ID NO: 26673 - DNA, 378 bp, Arabidopsis thaliana columbia
gacaagaaacagcaaatcagtagagccagagtgagtccgatgaatctttttgtgtctttttccaaggacggcttcttggggtacaagagttcgtcgagatttgctctcaatgagaagttcaggagaggaaagaccagcatgaggtgaagcacgtagctgagtctgacaatgtcgttgagaagagaaccaatggaagaaccagagctctggtcaaagttcactagaatatccgacatagttgcatctccaaagagaaggtaaccaaagagtccagttgcgaagtagatagcagcacacaagatgacagagatcttagttgctgggatcacttgtaatggatctttgagctcgaatccaattggatgaactgcacatttt

SEQ ID NO: 26674 - DNA, 507 bp, Arabidopsis thaliana
tcttggtatacaagtacatgctgaatagggatttaccaagctcattgttctataaatccaattccctagttgacaacggattgagatctctcgattggatcaccagactgaaaatagcattgggagtagcagagggacttgcttacctgcaccatgattgctcaccatccgtcgtccacaggtatgaaaaaccattccttttactctttttttactttcaagccaccattagttcattactgatcttgagtcttccaatgttcaataagggatattcaagcaagtagcattctcttggatgataagtttgaagttaggcttggaagctttagcaaagcttgtcatcaagaaaacaatggccgtccacggaaaatagcccgattgctcagactatcccagtaagtgcctctgattcatcatataaccaattttgatttaaacatctaacaaacaagcttgctactgttccctcttcaggtcttctcaagaaagtgttcatggtgagtt

SEQ ID NO: 26675 - DNA, 517 bp, Arabidopsis thaliana
tatcaattcagtcttcttctgctcgaagttttccttcatctccagtgcggcaatctccaggatcagcagctgctcaatcctctagctcttcatatgggctgaacaactattctcctatatttttgcaggtgaccagctattacctgcaattatgttattccttttgatttggaaaatctacttacgatagctgagtggagcctaagattatatcatgttcacgtttatggtgtttgcagtggcttgattgcatttcacagctaatgcggatgtatccttctgctttcgagttttctccggtatgtatatactgttaagagctgtcatggtgaaattttgttttaaaagtaatctctaaccatcaatattttgtttcagacttttctggtagatttcatagactgcttgctttcgtgtcgttttgggaactttttgtgcaataggtacctctcagttaaaactttcttttctgtagtttagtttgtatagtcagaaattcacatatgtaagataattg

SEQ ID NO: 26676 - DNA, 504 bp, Arabidopsis thaliana
tgaggaagatgagattgatgaacaagatcaaagtaaaaatgctggagatactgataaggatgatgaaacacttgaagaagagaaagagagtggaatgagtgagaacgatgagaaagaaaaagagactaatcatgcagatgaaattgatatgacagttgatgaggcacgcgaggagcattacaaggctgatgatgcttccagtgctgtgtctcatgagtctcggatactgaacactgagaaactgaaagaaagttcaaatgaaacagctcaagagaacaatcccaatggcgctacgagcgaggttgagatccagaaggaacctgacttgaagttaggagaagcagaaaacaccaattttgtgaacaaaacaaccacagatgtgaaagatggtgacagtgtatcatccagttctgaaacaaaaagcgcggtaactggatcaccaagtgaaacagttaatggcaattcggcagtagcactttttgaagcctctgagtttgtgaagaa

SEQ ID NO: 26677 - DNA, 1263 bp, Arabidopsis thaliana columbia
ctgcaaagagtggttactctccctcgagattggagccaaggtcagactgcaacaagatatctccagaccaccagggcatcatcaccttatgtaaatatccgaacttattttcgcaagagagcaatgaacagaagctatacactagagcctcttcttctctatagcagaaagtgatacacagtgacttatatctacagcgggtgaagcttggaatgatgggtggtgtgtaaaacttacggataaggatatgtccccaatcattaatctatacctaaggttgaacatggaagtgcttagtagattttacacaaactagcatcagatctggagaagacggtgcacggtaacagcaacagagtttgttctctgcaggtcctgcaagaaattgaaacataacaggttcaagtatcaagtcacgtgaatcttaaaactgaactatccatagcttaaggaccagtctagtgaatatagagaccagttcaggcaaattgaccacatacataaactgataaaattcggcttcaggtatgaatatatgcaaaaaatagttccttccagtcaatgcagaagacaatctaaatgagccaccaactcaactcaaccatgtatgcacatcccatcaaagcttacagataatccaatatgcacttaaaatttacctggaaaataatttcatcgggcacgtgtggcatgacttccctcactgtctcggccatagctagtatatttgttaagctttcatttgtcgtgtttgatacagttctcagatgcagaccacctgtccttccaccattaccaggaggtacagttgtagaagaagtggatgcttgtgaagggttcatcggccatagactccaagcagcatcgtcaagtgcagtttgagcatagctttcgccaacagatgcaagatgcctcatcatcatctgaacccgcccaagtccaactgtcctggaagtggtagaaggaccagcgacatcagaaccctgacttgaccatgtctgcagccaacttggatccaatcctaaattcctattttgtgaaagaaagggatgagaacttatacaatcccagtaaaataaatccaagaaatatgcacaaatagtggtcgtcagaaaccaaatataacttgctattcaaaacattttaaaataacgttactttaaggcagtgcaaatttagtatctcagtaccaagatcaagggagtcgcaggaaaagaatcatgaagttctaaataaattgttactttggtgtagttaataaga

SEQ ID NO: 26678 - DNA, 162 bp, Arabidopsis thaliana
catctcggcgatcgcggcgtcgaggtcgcccggcttctcgcagcggatgcccttggcgccgtaggctcggccagcttcacgaagtccggcaggctctcggagtagctctgcgagtagcgcgagacgtgcaacagctcctgccactggcgcaccatgcccatg

SEQ ID NO: 26679 - DNA, 630 bp, Arabidopsis thaliana
  unsure (1)..(630): unsure at all n locations
ctcctcctccatcgtacgatatgtcttctccagcagcctccaccaccaacgagccacggcacgagaatattcatagagtttcgtcgtcatcgttattctcattagtaaaaggactcataacaggtttactccaaagtcaactcatgagacgagctataaacttaatcaaccgaaacccctagaccatacgatattgccgcggaccaatcctccttggtggtttccgtcattacctaatgatgtagttttgaactgcttagctcgtgtctccagacgctactacccaaacctctcttgtgtttccaaaagcttccaatcccttgtgcgttctcctgagcttgcacatatgcgatccttaataggcaaagatgatcccgtcgtttatgtttgcttttccgatactaagccttttttgggcaggagacttgattggtttactttgaatccaaacgagaagaaaacaagtgttcttaactcatttcaggttttttcttactatatgttgtattgtcctccgtctccataggttcaaagatctacttcgttggaggatgcatgtacaaatgtttgcgggcctattgatctttgattcctggtcaggcgagttgtgtgtgggtntagcatgaagga

SEQ ID NO: 26680 - DNA, 592 bp, Arabidopsis thaliana columbia
tattttgatatatagacatgtaatggttgtattatctttttcaggttctatctgatttcgtaaagaagagagattacgatgagcaactacgaaaagaagaatctaggactaggagtgtttgtcagacatctcatgcttcttcgcatcaggtttagttaaagtcttttagcttctctgtaatatcttttggcgtgtggtctcatgttccatacattattcctattttgataagcagagtggtcctgattatcgatcagatgagtcaaggcggatacactgtacaaaatgtggtaattcacacatatggatatgtaccaataggacaaaagcaaaggcaagatggtgccaggtgatgaatccaaccaactcagaaacagttaaagaatattgttcttgcattttcgttatttcaaacctctcttacagataatctaatttgttaaatgtaggattgtggccaatatcatcaagcaaaagatggagatggatgggtcgaactcaaagggacattaccttcgagagagcacataaggtataaaaaagcttctttctcgccttgtcaaatgttataatgaatttggttttgcgcagt

SEQ ID NO: 26681 - DNA, 575 bp, Arabidopsis thaliana
tgtcacaagttttagtgatgcacttacgatatgtctccagctgtagatggtgaaccatattcatcaaaaaggcgcataagatccccaaactgcccatgcagatcaccaaatattttgataggagctttaagctgtaatacagtcggttcacttgcgaagatacgttctgcactatcacaaagatcagctatttcattgcaatctaggaaaaactgccgtcgaacaggaggcttccaaccacgaggcttcaaaagatgagctataacctattaagacatagttaggtcacatattgttaaaactccagaatcactaagcgagtctttaggcacccgatgcttaattgaacaataagaggatgcaaacgaatcttcaactatgagttaccagtaatggaaaccaggagatagtatacctatacaatagcttattcgatttctatcacaattaaccaatgccacagaacgaaagtattatataatagttcaagattgtcccttttcataatttcacacactttccagatgtatactgtgtttttaatcccatgtaggacccaataatcagaaaattat

SEQ ID NO: 26682 - DNA, 608 bp, Arabidopsis thaliana columbia
catcaatatcattcatcatcatcagacatcaggtgcgtcataagctccacaaaaaactcatccatggcgattcttagttacatctcagcaacatcaaccacaccaccaattcctcaagatcaatctcccaattctcgtctaccaaccaaaatcattctacccaataagaaacctgagaaatggtccaccggagttgctcccggagagtacggtggtcctccgactaccaccaagctccgaaagtactggggaggtgaaaaagaagatcccattacttccacagacttaatctggaacagagattttatggatcaaatgaagaaattgtttgatgatcctaatgattcttctctcgacccatctccttcaaaggttcaatctttatccccccaaattagctcaactttaaggtttcactaaatctctttaaggttttgtgattgcttacaggaaaagtcttctgggtttctgagctttagcagagttatgagtcttgacaggttcattctcctttaaactgataaaaattagtgttttatttcttgcattttgattaatggttgatttgtttgttgttgttacatgtggataattagtatggatgttga

SEQ ID NO: 26683 - DNA, 958 bp, Arabidopsis thaliana
tggtcaagtgaaatgatgttgtttaagcactgctacttcatattgtggctgaaacattgaaaaataatctatactcacgtctgccagcatttactgatgagatctgcaattgctggatctacaaagtcgggaatgtcaagacgtcgatgctgaaacccaactgccccaactacttgcatcgggttcatctttccccacggttgttgtaacgtaaagagttcccataagatcacaccgtagctgtaaacatcgcacctgtttcacgtattgttttttcctgacattaggcctgcttctgacaaaagggaacaaaatgaatatctagtagcaaaagatctaagagcatacttctcatcagcaggttcgtttcttagcacttctggagccatccattcagcctttataagaccaacacataattagattaacgaactggcaattacaataactgtaaaaagagatgattaagacaggggagactataacttgcttcttaccgtccctgctgttgactttgaagagaggtatgtactgtgtttcatcctagacaatccaaaatcacacacctgatatatatgaaaatccagtatttgttatgtaaacttatagctgttacatacgatataacattatccacttggtaagaaacaataaattttatggagagaatctgaccttcacgacccagtttttgtcaactagaaggtttggggacttaagatcgcgatggacaatcatcggattacagctgtgcaaatagttcattccacgagcctgaatacaagtaatatgttacctcaacactctactgaaagaatcaagaagttacaaacaggtgatatagtaagagaagaaaagactaatacagcatcaagggccattctcaggcgcctcctctcgtctaattggttatttggccggtggattaacgtatacaagctacctctgcacaagtttg

SEQ ID NO: 26684 - DNA, 586 bp, Arabidopsis thaliana
gcacacttacgatttgtctccagctgttgatggtgaaccatattcatcaaaaaggcgcatgagatccccaaactggccatgcaaatcaccagatatcttaataggagctttaagctgtaacacagtaggttcgcttgagaagatacgttctgcactgtcgcaaagatcagctatttcattgcaatccaagaaaaactggcgacgaactggaggcttccacccccgaggcttcaaaagatgagctacaacctaataaaattgagttgtgaatcattagaaggtattaatagtcaactcggaacctcataccattgaacaatacaaatgatctagtcggattacatgtctgtttaaaaataagtttccaaaactattaaaccaaggggtaatacacctccacagtatctaagtacacttcctatctttatcagacaaaccaaatgaccagtgccacagcagacaaattctctacaatagttcgagcacacaataacaatttcttgcaacacttaactgattaacaatttacctttttcggaacactattgattgacatctgacgatctaataatttcctagctgctgt

SEQ ID NO: 26685 - DNA, 444 bp, Arabidopsis thaliana columbia
gctggtaacaagtaagccaatgtcttaccagagccagtctcagcaataccaatcaaatccctacccttcaacgccatcggcatccctgagcttgtataggtgttggctcagtaaatcccaatttagcaattgcttcaagaatgttatctaacagataaaaggaaccattaaactaagaacccaaattagatataaatgaactggaaactctatgaccaatccaatcaaaatacctggaaagttagcatcttggaacatcttcatcggcttaggaacatcacgaccttcaacggatatatccctctcggttctgtacattgcaacatcctgctctgtcatagcttgcacagtgggactctccacatagaaattcttctcaaaatgtacaagattcccaaaattctgcttcggaagagaaacactatctagctctcttttactcga

SEQ ID NO: 26686 - DNA, 471 bp, Arabidopsis thaliana columbia
agctttgcttcacttggatccgaattctccagatgcccaagtcatctaccagctagctaaaggtttaaacaaaaccggcccagcctctgctcccactggctcgtcccctggacctataagcattgctccgacttcaggatccgatgatggtaacaacagtggtcgaacgacctctgtgccaggcaggaaccatgctcaaagcttctatacacaatggctggggctcgaagttgtgttccagttctccgtaatgattcatatgttcatcctcgtatagataaatactgataacggtaactgaacagcgtgtgatgtcgattagtgaaattgcggtgacgctgatttttgcagttactgtagcgattggtgtagttaactctagttcgagaactcgtcctgatatattgtgtgacgcaatacgagctacagtttttcgactgtctcgtatggttcgagcagtgttatctgaaa

SEQ ID NO: 26687 - DNA, 507 bp, Arabidopsis thaliana columbia
taaattttgctttattgttgtaaaattttcggccaaactacgcaaatattatattagaggattttggatatatgattttatcttttgaagtattataatgttcttttctgttttaaaatgaattgactattgagtttgaagtgaaattggaattgactactcaacaacgtgtgtctcttttccacctaaccaattgtgcaaaccacgcaaaaggaaaaatatcaaaaaagtctttaaagagggcaaagaaatcacccaaatatacgcattcgtcatttggtccctccacttagagagaagcagacagaacataactaaaatcgagaaaaatggcaaacagtggtgaaggtaaagtggtgtgtgtaacaggagcctccggttacatcgcctcatggctcgtcaagttcctacttagccgtggctacactgttaaggcctccgtccgtgatcccagttccgtaccctctcttctctatcacattcatttgctttagggttcatatacta

SEQ ID NO: 26688 - DNA, 625 bp, Arabidopsis thaliana columbia
tatgtatgtaccttgtacttccactcgcataagttaatttttttttcttgttaaactttccaaaaaaataaacattttcaaattttgacaagacttagcagcttagtgtggtttgtggtatagtcgtaaaatttatcagatcatcaattcaaggattatactagtaatgaaaaaatggtttgtgcttgtatgcgtagaagcgagatggaggtaccggttgatgaggggcatttcctatctatgcttctaaagataatgaatgccaaaaagacgatagagcttggtgttttcaccggttattcgttgctcaccacggccctagcattgcctcatgatggacatgtatgtacacaacactccttgatttttacaaatcaaattaagcaaaaatgataagagctagcatctatgaacaggttactggaatagatattgataaagaagcttacgagatgggactggagttcataaagaatgcaggtgttcatcacaagatcaatttcatccactctgattgtcttcaggccttagacaatatgttgagtgtaagtaatcagtcttcatttttctctcttttggtatgctattctcttaagttgatgacattggtttatgaatgataatg

SEQ ID NO: 26689 - DNA, 857 bp, Arabidopsis thaliana
tcttgtgctttaagaatcggtgtccccatgtcaaccttaacctgtaccaatatcaatcacaaaaaataaaaatccaaactttaccttacccatcatcatgaatacgactaaacctaatatgagacatcaatccaaatgatctacctgtccgtcatcttgaatttctggaacaaatcaacccggcaccggtatgtattgtaaaactacaaaaacaaataaatagacacttaaggttacatcaagcttgactaaactcggaactctcaagtctaaacagatatttctcaatacagatagagatacctatgttttccctgcaaattctcaagctcagcaatgaacctagcaaagcatcgaactccattgccacacatctacaagaacaaaatcaaaagccaatgacttcgagcgcaacaacatatcaccagacattatcatcgaaaagccccacctctggttcactaccatctgaattgaaaatccgcattgcgtaatcagtaccattgactcctggcattgcaaaaatcactccatcggcaccaacaccgaagtttcgatcacacagcttcgccgcctgttcttgagtaatcttaggttccgatgagtctctgttatcgacctacaaaatccaattccaaagacgaaaaatttgaaaacatttgtaagaattcgatacatttcgggttaaattaccaaattgagaattcaacggtgaacaaaagtaccaaaatgaagtcattgccgaggccatggtatttcacaaagtgaagaactccggtttcttttttgtctagaaaactcgccggagaaaatttctcagctgtgacggcgtccatggaagctgctgcagacacacg

SEQ ID NO: 26690 - DNA, 561 bp, Arabidopsis thaliana columbia
tgccattgcgatcatcatcatcatcaacgatcctcctttctcctcgctgcctgctcctctcttcctcttcttgattgttctgtgttatctccaattgagttttcaagaactgcattctctgcaactccatctctttagcaaatttcatcctctccttttccagttccgccattaacttaagcttagcagtttccgccttctcataagcttccgtaaatccaagtatcgccctcgccacatctccaactccactccctccacctccactcttatccaccttcaaccgctttggcatatgaaacgaaagcggttgaatcggttgcaaaggtgggagactctcagcagattcctcaggagaagcctcaggttcaggatcagactcagactcagtctcagaagcactacgtttcctaaaatgccaccgcatcgaatcagagcctctcttctcttgttgttgctgcacaatctgattacctttagtttgccgtttaaacatactcgaacggctattccaagagctcctccataggagcttctctgaacttttgaagaacaatgaat

SEQ ID NO: 26691 - DNA, 581 bp, Arabidopsis thaliana columbia
attccttccaagtcatttgggagtttgtcaacagatgttgccttaagtacatcgactgtggatcaaaatgatgtttttaaatcagtcacaatcattaatctactgaacagacacaaccaaagatcatctattcccgttggttcattcacaatcattagggaaacaatctctagatactgaatcaaccatgcagaaactgaactacttagacaattgaggaatgaggactgttatgtattttgaatatagaattggttactaataaaaggatagaatactcacatccgactctctcagcatcaaccatgcggagatcaacaggaatctcttgaaaatgtgcaacgagttgtcgatcaccgagtgagaggtttgaagagacaaaagctttgatagtaccctcaccattagtaaacccagtatccacagttaggtgaattgggttgggtactctctagcatagaaatcatgaatcagcgaactaccgccattaaccccagcaccagttgaatacctgcaaatcgaataacttgttcaatcaactattccaaaatgagaaactacctaatgcagtgttccacaca

SEQ ID NO: 26692 - DNA, 946 bp, Arabidopsis thaliana
  unsure (1)..(946): unsure at all n locations
gaatgtccaaacgttcgaaggagaagaagaagaaagctaattctactagtgacactagcagtggctggagctttgttgctgttactctgttgttgtggttatgtgttcagtttatggaaatggcggaacaaactaagattgggcttgagtcgggacaagaaagggaccccctcacgtacatctagagcgagttctggtgggacaagaggagaagacaacaatggtggacctaaacttgtgatgttcaacaacaagatcacgttagctgaaaccttagaagccacaagacaatttgacgaagagaacgtattgagcagaggaaggtatgggttggtcttcaaggcgacgtttagagatgggatggttctatcggttcgtagactaatggatggtgcttcgataaccgatgcaacgttccgtaaccaagctgaggctttaggtagagtgaagcacaagaacatcacggtcttgagaggttattactgcggaccacctgatctaagacttcttgtttacgactacatgcccaacggaaacctcgctacgcttttgcaagaagcctctcaccaagacggacatgtcttgaactggccaatgcgtcatctcattgctcttggaatcgctagaggactgtccttcttgcattctttatcaatcattcacggcgatcttaaaccgcaaaacgtactcttcgacgctgactttgaagcgcatttgtcagaattcgggttagatagattgacagcgttgactccagctgaagaaccatccacttcatccactcccgtcgggtctttaggctacattgcaccggaagcgggtttaacgggtgaaacaagtagagagagcgacgtgtacagcttcgggatcgnntgtgtagagatcttacgggganaangcagtgatgttacagaggatgaagatatagtgaatgggtgaagagcag

SEQ ID NO: 26693 - DNA, 653 bp, Arabidopsis thaliana
ctaaacacagaaacaaaaccagacttctctctgtttcattagcaatggcttctgaaagattgcatctgatcttattggtcttctttaatcatctgactttcttgttaagtcaacaagaagaagccggtttcatctacaatggctttggccaagctcaagctggtcttcatctagacggagctgctaaaatcctctttccagatggattgttgcagttgacaaatgcctcaacacaacaaatgggtcatgctttcttcaagaaaccattcaagtttgattcatatgagaagaaactctctttttcgactcattttgtgtgtgcgcttgtgcctaaaccgggagctgatggtggccatggaattgcctttgttgtatcctcttccatagatttcacacaagcagatccaactcagtacttgggacttttaaacatctcaacaaatggatttccatcttctcagcttctagctattgagctcgatactgttgagagcgcagagtttgatgatatcgacaagagtcatgtcggtatagacatcgaaagcctgaattctgtagagcctgttccagcttcatactgttcacacgccaaagggaagaatcaaagcatcgagctcttaagtggagagcctatacaaatctgggtggattat

SEQ ID NO: 26694 - DNA, 629 bp, Arabidopsis thaliana columbia
agtaacagccgccagcctagctgtcatatattgtaagatcttcctagcatcttcgtgaagtccccccttcccacaagcaaatattataccctcatatgtctccatgtccggttcaatattctcctccaccatatcatggaacaaagttaccacctccttaaaataccccccttcccccaaaaacctcaatcaaaatgttatatgtagcagcatcaggatccgtattgcttgatttcatctcaagaaaaagctgcctcacatcatcatacctcccactctgtccaaacaaattcagcaaaacactgtatgtatttgcgttcggcgtacaccctgcagcttgcatctgatggaagacccccattgcctccttaatagacccggatttcgcatatgcctctaacaacacattataagaagtgatatccggcaaactaccgccggacggatctcgcctaaaagatcacatactttctccagccggcgtaacttcccaaatgtctcaactagatgactatatgtggttaaatccggaacaatcccaccatcattcatagtcctaaaaaccatttcagcctcatcacctagacctctaatagcacaagcactaagcagtgtattataagcacgat

SEQ ID NO: 26695 - DNA, 610 bp, Arabidopsis thaliana columbia
caataatgtgagttaattacctcgcaactagcaatgtcaccacagagacggcctattagtgcagaagtcacaagaaggggtgggaaagtgcttaaccattcaaacacatcaagggtgccttcatccaccatccctagaaaggatcctgttaacagagctaagtagctcgatgaataaactccgttctctttgtactcgtcaaatgttgccacaaagtcttcactcaaccattttgcctcttgaagataggctttagcagttacaatcatctgatttattaacatataaccaacaaatttttcatttagattcaacacacatgaacatagacttagtacttaattactaattagttttgtgcttttgaagtagttgtgtatataagtatttagtaataccgattttttagcgaaaaggccgcatcctgaccttccttccctctccatatcctcctcaagttttccgtagaaatctaacaccacatgatgaagatacctcatgctctccgggagcccttctatgccgctagggattcacataatcaatgaaatggttcgagtcctcaatcgtgcaaatgcatcgtacgtatcatcacaagagtcaataagat

SEQ ID NO: 26696 - DNA, 484 bp, Arabidopsis thaliana columbia
aaagaatgacagatcgttatcaacgtgattatgcacaacaattgtgtgagaattatgtgatagtgacgtggcaataaaccatatgacaagtgttgagcattattggatatgattggcccaccactcaaaaacctcattatagattctcttctccgacaaggacacttttgttctgggtcaatggtcgtatcagagatctctctcaccaaacaaaaatcgaattcttgtgaacagattttttcttttaattcacatgaatttgaaaaccataatgaccaaaaagtatagatacagaaaaagtttggcatgcatttttagaatccaagcttttgtattaacttcgaatagtcgaggccacagcatgagcccaaagccttagattatcttttaagtcaacttcgctagccgccgccgcgctcggaactctccacttaatctccggcgtgatttgttttttccttttcttctccacaatgatccacgc

SEQ ID NO: 26697 - DNA, 544 bp, Arabidopsis thaliana columbia
tgctctgccaaggctattatttcttgagtgttttgtaccattatgacaggcttatctccagtgataagttccgctagaatgactccaaagctataaacatcactcttttcagtatattggctggaccggtaatactctggatccacatacccaaccgtacctgaaataaccgttgtccaatgagtttgatctatggttactgaccttgatgttccaaaatcagccaccttggctcggtacttttcgtctagtaatatatttgttgacttgatgtctctatgataaattggagaagatgcagcagaatgaagataagaaagagctcctgcaatatccacagcaatgcgtagacgcattccccatatcatagtgtaatcatcagcttcttcttcgtggatatgcttaaagaggtttccgttgatgataaactcgtaaaccagaataggaacttctgtctcaagacaacatcccaagagtttgactacatgtctatggtttatctgggagagaacacgacctcattgatgaactcttgaagtttgtc

SEQ ID NO: 26698 - DNA, 438 bp, Arabidopsis thaliana columbia
atgagttctagccacaatggtgcaaaagccaaagctgaccaagggaaagaacccgaaactccctgagcgacaaagatttggaaagacggaatctttatcaccatcttagcttctttcaatagatctcttatgtctgaccagaaaggtttgtctttgacatgttttgtgatctttctgtcgctgtagtgaggatctgttgcgaagagacggaccaaaatgcctactatcacgctaacgactgctaccaaaaggaaagcgattctccatccagcgacaccattgaaagattttgaggcaaagaggatggaacatacatagccaagtatggaaccaatgtttgatgtgaatcctaaccacccagatgcgatcccacggttatagtcatcagttgagtcagcgactagggactgaatcgcgggtgtcacaatggctagccta

SEQ ID NO: 26699 - DNA, 523 bp, Arabidopsis thaliana columbia
taatactttagtttaacacatgcattcaataaactaatgaaagggtaagaaaaaggaaggctaatgctgtgattgtaccatccaaaaatgtcccaagcgtcacggtttccttctgtcatctcccatagttctccaagactcaacttgtctggcaaggttttcgcatatttgctaaatatcaactcaagattcaccggcataaacctgaaaagcatacggaagttataccatatgcatcagtcatcatattttctatcagtcaaccgtttttttcaagataatatggtcactcaccttccttcattgtcatatgtttttgaatcacttccatgctttgacttgtgtatgttgtgtatgtatatagggaagaaaggtgaaggtaaccacccctgcatataatcaagtagaacactaacaaaatggacaacggatttggatatgataatttccgagtctagagtagaatcaatcaaagttttgcgatatatgtcagcagaggaggagaggtgttactggaagagtg

SEQ ID NO: 26700 - DNA, 485 bp, Arabidopsis thaliana
cttgacagatttccctccaaaacctccaccaacacgtctggttatgacacggatgttattttcagggatgcctaggcaagcagcgaccgatgactgtacgtactgaggggtctgtgttgaactatagactacaatgcagttgtcttcatctcccactgcaagagctgtttgtgtctccatgtagaagacgtattgcgatccgagtcttatctgtttcacatcaaaagttacaacggttgaacatatatatctaatttttacagtaaaaaaggactatattacatacttccgagctgagaatttggtgatcagcttcagccattccttttgatgtatcaccaacttgttgtggataaaggaaagggataatgtcaaacagactagatttcttgaccgcgtcttctacagataagattggtggtccaaatcctctgtctcgtattcacaactgcaaggtttactgcagcatccgcatgtctctgcgt

SEQ ID NO: 26701 - DNA, 575 bp, Arabidopsis thaliana columbia
cttttcagtaaagtgaagttaaagtactttgcccacattaaaccttttcgttgctgcaacggatgttgttcctcgagtgacccatctctcgggtttatgtacaccatctttctcccgctatgatatgcccagacattaaccaacagttccagaacccggcagtaacaatgctttctctaataattgttggaaaaagaatcataacaatcaaatatttgtgaatatcagagaacaaagtcaagaagtaagaatctgagatttttacctcgagcagtgatgaagccagtgagcaacttttggagtcgttaagattgttgtgcagtgcatctagagactctgagaacatcctgtgattgtggttgaaactggggcggtgagtttagggaaatgctggtttttttagtgaatatgtgggaatattatttaccttgagaacatgacaaactcgaggaaagacggagttggcatcacccaattgtggagagaagaccagtgatgaccatcttcaggcatgggaggaacgcttcaatgtgttctggtacccatacatatgccggaatgcatcttcaaaagtg

SEQ ID NO: 26702 - DNA, 537 bp, Arabidopsis thaliana columbia
catagttttgaacatagcaatatttggaatggatatcaaacattaagaaaacagagtacctctaattaaatattatttcgcatttgtctttttagtactcttcggccaaagcttttggttggggaacctctgtatccttggaagaggccctccgcagccgctgcttctccgacttttgtttcggtgggtcgtgactttgtgcttgggagcgttcagtttccgggtgacttacttagtactcttcgcccggaggatgctagtcgactccgtttttggtttcgtacggtgagtttatttatttctgtggtaaattatcctttggccttattttgacgatccatgatttcttttgttttttccacagttggagacacaacactaggcgtattgccgtcgccatgccgaactcgttcgaatgatgcaagaaatagagctcaaaatgaggaggctggaggtcgaccctcaatattgggagtgctatggaattagtcgactgaatcatatgtaggtgtttctacgggagtattgttgagttag

SEQ ID NO: 26703 - DNA, 568 bp, Arabidopsis thaliana columbia
aggatccccgaagcctcatacgtcactggtgggaatgtaaactgctactgccactttggaaaacagtttggcagattctcaaaaatattaaacatagaattaccatatgaccaagtgattacgcccctgggtatatatccaagagaacatattctcttggatatatacaaacttggatatacaaaaacttgtacatgaatgttcttaccagcactactcataatggccaaaaagcaaaaacaacctaaatgttcattaactgatgaatagataaacaaaatgtggtatatccacatggtagaatattatttggcaataaaaaggactgaagagcagatacatgctacaacctgaatgaaccttgaaaagagtatgtaaaataaaagaagccagacacaaaaggccacatatcctacaattccgtttacatgaaatttccaaaacagacaaacccatagaagcagaaagtcaatagggtttgccagggctacaggggaggaaaatgaagagtacctgataaaggatttctttttggggtgatgaaatgttctggaattggatagtggtg

SEQ ID NO: 26704 - DNA, 255 bp, Arabidopsis thaliana columbia
cggatcagtggttcgagtagttgcagtagtggtagtagtacttcctggataatgctctttgtcttcttcctcagtagccatcccaaaagtatgcttcactgcatcagctgcacccattgccatttgcttaacatgctcaccagtctggctcaagaatccacccgtcttgtctctaccggcttcagcgtctcctttgtgtactgtgccgcaccttgagccgtctcctttgtatactgagcagcgtcttgagccttg

SEQ ID NO: 26705 - DNA, 558 bp, Arabidopsis thaliana columbia
tccgtgattgagttttgattagtaaaatgattcgtgatttgattttgatttctctgtttttattatctctggttggtttggtttgatcaagtctctgatgctagggttcgatatcgtttctgcatttcgtaagaagaaacctttggtttaaatctcagtgttttatttggctatgaagcagagagagtttgaacaaggaaggattgaactatggaagatgcatcagagactagctactggtgtcacatgtgctcccgatcggtgattccattgattcaagacgaaatcatcaaatgcaatttctgtcaaagtggttttgttgaagaaatggataataatgatgaccatcaggctgctgattctctctggactcctatcttgatggagatgatgaacaacaatcacgaccaacattctaccaatcaggaagactcagaatctattcttgaagatgaagacgaagacgaagatgatggtgatgatggtgatcagaacaatgatggagaaattgatataactcatcaacttgaagagattagcgaggataaggactagaca

SEQ ID NO: 26706 - DNA, 612 bp, Arabidopsis thaliana columbia
cactagtgcttgtaatttcactaacccttttaatgctcttaatgctttcctcgcctaccacaaaatttataaaattttgatttcttttgttagactaattgaagcaaaaaaatagaaaaaatagaaaaaaaatggattcgttacttggaatttttgtaaacatttaccaaatgagaacgatagcacgcttgaatctttattgctgcaaattcttcaatctcttcagctgaaacgttcttgatttgttcatcttcattgtccacgatttcgaccacaaatggttgttgtagcggtggaggtggaggtggtggtggcggcggtggtggtgaatctttcagtgtaatagcacaagctggtggcggtggtccagttgctgaagaacgtcgaaaactccatcgacgtttctccttaggagtgcctggaatggaagaagtgaatacacactcgctttgaatgatatgttcctttgttctctctttctttccggttaagagacttcgaaaccatttgctagtttccccattattatctctgtaactcaaccaccattgtgaaatgcagagaagagagattgtatatgtgtgtgtgtgtgtgttggttcgagatgtatat

SEQ ID NO: 26707 - DNA, 507 bp, Arabidopsis thaliana columbia
taattgcttcgtatttggatgtatatattagaaagaagcaaaccaatctcttctcctcaaaactattcctactctcacactccaaaataccaaaaacaaaacattttttttaatcttcccaccaatttttttctctttctctcgttacattaaattatctttagatgcaagactcttcctctcacgaatcgcaacgtaacctccggtcaccggtgccggagaaaaccggaaagagttctaagactaaaaatgagcaaaaaggtgtttctaaacaaccaaattttcgtggggtcagaatgagacaatggggaaaatgggtgtctgaaattagagaaccaagaaagaaatcaagaatatggctcggtactttctctacgccggagatggcggcgcgtgcacacgacgtggcggctttagcatcaaaggtggctctgccaccttaatttccggagctagcttaccatttgccgagaccggctagcgcggaccctaaagacattcaagaag

SEQ ID NO: 26708 - DNA, 535 bp, Arabidopsis thaliana columbia
ccaacacgcgtgctgcgatctccgcgtcttctccgaagaatctgtacctgtaaccaacttccaccatcaaaaccacatctgggtacttgctctttagctccaccacttgctgttccaatggtgtgtatttcctcgatgatgacgtttcgggaacatattcctccggcgagggttccagaaatctctggagaaatctttggtgtaaattgggatcgggtactgggttttgagtgtgaggagaaagtttaggctttttgggtgacgcggcggcgaggtggtcggagagaagcttacgcttggaaggagagaaggatacagtggcggatatcttcggtggcggtgttgatgattcggctaccggattcggttcgtgagtcggggatttgggtttgggagcgaagaaacgagaaatcgtctgctgcttttgcttgccataattgctttattagtaatctcctccgtttaagagaaatggaaggtcgtggtcgtggctatggcgaacttggattgccaattttcgcgcgctttcttaggt

SEQ ID NO: 26709 - DNA, 565 bp, Arabidopsis thaliana columbia
ttattttgacttttgatcatggttttgtgtggaaataacaaactaaagaaaagaaaaagagatgcattatttattcaatctcaaagaggggttatggataaatttgttaaaaaacaaggtgataatgctagtgtttctcaacaaaccaaaaacgtgaatgatttaaatgatggttccagtaataatgttccaaatgcatttgaaagttttaatgttcatgagcaagaaaatatttccttataatgatcctaatagattgagtgagcatgataatgtgtcaaatgcatctttacatgaaagtttgaatggtcatgaacaacaaagatttcattttgatacttttggtcctagacattgggaaaatcttgataataaaacaagagatgagttagttgcatgtggacttaaaagagaattaaatttgactttcctcttgataaatattatagacatttctcatatcaatattattctagaaaattgagtaatggagaaacttgtgatagaaagtggttagtttgttcgaacatgtgaataagtttattgtttttgttgcaagttgatt

SEQ ID NO: 26710 - DNA, 516 bp, Arabidopsis thaliana columbia
ctcataagcttaaccatcggtaagtaagactcacacgccgtcaccattccttttgaatcacctctcattgctctcacagccatcattgatagcaacccagttccagcactatacacacaaattccacattctcctttatcaaaatctgagtgtttaaaccaagaattgaatcaagtttatggaaatgactcaatgagaagacgaacccaatgtccaggacgtggcaaggttcagtgatggttttctcgatagcgagacgataagctatgttacggcgagaatcattgagcatgtcgagatacgacgtcgtcgcgagtaggccgtcagtggaagttccgggttggtcattgtcctcaatgacaatccattcggaatttccggtgagagggtcttgtctgagctggaagacgcgttgactagactgagagctcatggttcgagcagtgacggaccttcttaggcgagtcactgagtggcaatggaaggaggagataaatgttttgggaggatgagaag

SEQ ID NO: 26711 - DNA, 536 bp, Arabidopsis thaliana columbia
tcaagactctcagcaaaacaaaccacaacattgttaacaacagattttcgcggaaacccttccatttgcatatgttgttcaaacaatctccaagcttcatcacatctatgttcatcaactgcaatttgaatttcttcattgagtttagcaggatctctggcttgaagcagtatagatccagaaatgcttgaaattgcttctcttctatggatagaccatacatcgaatctggtactagtacgaaacctagttaacacactgaggtattttgcattagacagaacagctttacccgccaaaccatgttgtaaagaagcttgagattgagtacctgtaacttcaatggcgtgaataagaactccacgaaacaaagaactcaaacgacactggtggagtgaaacaggctgaagcttagttttcctcaatgaaaacattgaaagatcttatttttcttcgtcaattcgttaagaccaatttgaagctcctcggctggtatgaggatttgatgaaaactgtttcccagtttcatttagaca

SEQ ID NO: 26712 - DNA, 495 bp, Arabidopsis thaliana columbia
tgcgaagaaaaaatctagtttgtatgctaaatcaatgcaattttatgaagttgtgaatgacttatgcatgcactatatagtaatcttaagttcttaactacttagtacttactaacaaacattcttttccacttacctttataacaacttgtaaagactatcgggatttgtatccttggtttaagctggtgttgtcgatgtctcataatcatataaactgaaaaagaaacgattttctaattttcgaaataccaaaatttagtaactccattgtttttaaccaaaagagtaacataatccttttattcttcattgtaaatggtcaaaactgagtacactaacacagccgccatggaatcacaaagataaaaacacaaaactaaatttagtaatcaggtttctagtcataagctgaactgcgaaatctcttgatagtagaatcattaagtatgtcaagcataacagaattggtcgtcacctaggagtcttaactgg

SEQ ID NO: 26713 - DNA, 605 bp, Arabidopsis thaliana columbia
gcgataatcaccgccacgtagatcgtcgcgagattcccgagaaccgcgtcggataacgccatgagacacatctaggactttacttcttcttcaccgtcgccgtgaaattcgttgcggtggaggaagctttttaacagaaaaagtggagaaaagcgaaattgtggtggatgttgaaatactcaaaaagacgtcatccttgtcaacgaagggaaggatattttgaaattactaaaacacccttgacaagatcttttgcttcctctctatggctcatcactaatgcgagaagagtttggtaaaagtacccttcccgtaaaacgtcaccgtttcgggatttggtcagacttgccacgcactacatttatgggtgtatgacattctcacgcatgtcgttgtcaaggtcctcaaagtcctcaagaggctctatttatgtctgtggtcaaaatttgatcgtcgtactcaaaaataaatgctctttggacttagtaattgtttctaacgggcctctaaaatcagtaatgggctccagtattagaccatcttggtattactattaagagtcttctaatttgaatagtggtgtgttcgtatgagatattatggca

SEQ ID NO: 26714 - DNA, 602 bp, Arabidopsis thaliana
  unsure (1)..(602): unsure at all n locations
ccctcgtcctcttctcactcttctctggcacatcttgtaaagccctctttatcgttctatacttccctgaaccatccttcgccaccacaatatccgccactttcctcaaatccgtgctctgcaacaatctccgacccgcgtggaagtccacctccacgtctgcagttgttaacaaacgcctccggagtttgaaagagtcagcgatcttcccgagccatgtgatgatcgctagtgcgttactcgtcaactccgttgagttcttgagatgactttcgccgaacgcgctcatatctggagccaacgtttccacgcacgtccgttgatacgtcccggctgaactcagccatgtacggagatcatcgactagctcaggaaccgtgacatcaccgtttgatgatgaggttaacgtgttgttgaggttatctatcgttaggtcaagaagctcagcgcaacgtnntcantggtgatgttgttcttttcatcgcctaaggatgaagagaaagcgttgatagcttttgaaacttcggcgattgtgattttgactgcgtatctgaagagctcttctggattgagactgcttgcgtttggagctgatccgaggg

SEQ ID NO: 26715 - DNA, 556 bp, Arabidopsis thaliana columbia
ttgtatgagagatttatcagccaggacttgaagtccgaaactaacatatgtgtcattgttagctatgatcatctgtttcaaatagttttcgtgttgaccgctaaaaatacatgcaatatgaagaaataaatctttttcatggtcatgcaagccatcatacccgacttttaatactttctctacctctccatcaagtcgactttttagcgtaggcagggaaaattcccactcttccttaccctttccacgcataaacgaaccaagaacccgtagagccagcggaagatgaccagcaagagttgtaaattcaattgcaaggtgctttaaatcatctgatggggaactttgcttaaaagcatgctggcaaaatatagtaagagcttcttgttttgaaggataagccacctggtacatatggttgatatcatgagaaaccaaaagttgtttgttttgggttgtcacgacaattctgctcttgttccaaaccattgatttcctttgccaaggctttgagttgccaatattgtcccatcatcaagaataattagaacttttt

SEQ ID NO: 26716 - DNA, 603 bp, Arabidopsis thaliana columbia
ttttgcatttctgtacaggtccattgttctacaagggatggtaccatttcttctaccaatataacccaaacgcagccgtatggggtgacattgtttggggtcacgccgtgtctagggacctaatccattgggtccatttgcccatagccatggtcgctgatcaatggtacgactccaacggtgtgtggaccggctcagccacatttctccctgatggctctatagtcatgctctataccggttccaccgacaaagcggtgcaggtatgtaccccgaaattattcctacttgcactcaattttaaattgttggaacaagataataaaattgtagaaacagtattcataagaaagaattaacttagaaaaataaaacacacaataatttcaaatctaattttagtttttgtaatttacaaccaaattactcttttctaaatataaaagctaataaaactctactaaaaatgattgaatccaataaattgtcaaatctaacaagtatttttgttaaagatatattccaaactagtacgtttaacttttaactataaaaactaattcgatgattagtaggtcgatcaatgatatatatttatgtgtg

SEQ ID NO: 26717 - DNA, 532 bp, Arabidopsis thaliana columbia
  unsure (1)..(532): unsure at all n locations
cgccagtgtgctgtaaagaccagaatatgcttccacgggctgataaagcgacctttctccagaatcacaatcgcctgatgaataaggcccgaaaaatcgacagcgttttctgccttcagcgcacctttccaggcttttaataacggggccatcaacttgatacgtttactgaacagatcgcgaatctcttcgggtgcactggcaatcatttctgcctgtgcaccaccgtgcatccgcatcagacttacccagcgatcgaggcgagaggcaaggcgacgctgtaatttttcatcatcccagaagttaccttctggcactgaccactgcatttcttccgtcagccattgccgccagcccttcgcctgcgctttcttttcgctgcattgcttgcgccactcagcaataaagagttcatgacgggcagcggtatcattttccagtttgctgactatcggaacttttttgctgccctgctgaataatatgcagcgcacgcantgaaacgtgcgtgcggtaatgtcttcggtatgtag

SEQ ID NO: 26718 - DNA, 502 bp, Arabidopsis thaliana columbia
  unsure (1)..(502): unsure at all n locations
agtaactttcgccagtgtgctttaaaggttgcgctcgaccattgcaccccgctcataccattacggcgatagttaggctcttcaacccagtcgccctctgttgcccaccagtgattaaattcgtcgtactttgctgaaactgccataccctatcgcctgtcatttttattaacgacaatgactataggtggttacctgaggaaaatcttaatgaaacgtgtcgtattaatgaatttcttttgccactactagcttgacaccgcttttacccttcatttgcagcgcatagattccaccagccactaccactaatagtgcgcccagcagataaaatgtgaatttaatcaggcggatacagcgatgaattttattcgacagggattaggcatcgcgttacaaccagagttaacgctgaaaagcattgcaggtgaattgtgttccgttcctctcgaaccaactttctatcgacagatttcgttgctggctttagagnnnnnnnnnn

SEQ ID NO: 26719 - DNA, 752 bp, Arabidopsis thaliana
cgctaggagctggtacttgagagtaaaggaccggccgttgagaagcatactagagagacgagatcggagcgaagacagtgacgcacgtcgatcaacaaccacaatacgagtctcgccgccggagtacgtcaacgatttgtcgtgtggacgaggcatgatgtggccaccaaaactgcacataagacgaagcttagcgccgggaacagccgcaagtggctcaggaatacctccggtatcagtagcaacggcgcgtggagatccatcgatcggttgctgaacggctacgctcttaactggcgccggaatagcggaagagacggcggcggcgggagtaggatttggggttagttgcgataaaggagggagtggggtctccattggttcgataacgacgggataggttagttggacggatttatatattgataattcgaaactaatcctttattaatcgtcaacataatcactattattattattaataagaaaaataaattgtgatttgtataaaaataaaataaagatgaaacgttagattctctgcagagtaaagtgagctggagaaatttacagagatgatgattcatcgccaggtaatttatatttataaatttggtaccatcagatttatattttattaacgtaatgacaacaaaaaaagtacatataaagctgtttacgcgtatctaaattaaagtttttctgagattttaagattggtttttctgtttttaattaattattaaaaagat

SEQ ID NO: 26720 - DNA, 528 bp, Arabidopsis thaliana columbia
cactttaacgaagaccaattcagatcaagtatctctctagctaaatatctaaatgaaactctcaaaacactaataactacatttaggaaaggcaaaagaggaaaactgacttgaagtctgcttttgcagtgagagcatttgaagcaagccttgtgataagagattccatcagctgagagaagctccacagggtacactgtcttctcgcacgccctgcatttctgctgagttcctgtaaacgacatcgtttttgagatcttctttctacctccaaagatctctcagctcaaaccttcttcctctgtaacaacaacatttcaaaacccaacaacacaaagaggtttaacaaaaaaaactacattaacacattcttgacttttcacattagccatttgcatcagttcaaacaaatcaatccatggatccataaccacatattttgattcaatcagtacacaaaaatcgaatctttttctacaagcattgcgaaaaaaaatctgatttttaacagaataaaatcgttaagac

SEQ ID NO: 26721 - DNA, 420 bp, Arabidopsis thaliana columbia
gtgacgatgcctgctcagttagctggaatatcgggagatcagtttactggaatttgtatctctaacgtgactatcactctatcgaagaaacctaagaaagtgctttggaattgtactgatgtttcgggttatactagtggtgtgactccgcagccgtgtcagttgttaccggagaagcagccggggacggttgtgccgtgtaatttcccggaagatccgattcctattgatgaagtgaagcttcaacgttgctactccagaagaaggaatatgtgaacatgtaataagatcttcttttttttaacaaatacttttcttgggttataagtaaatgtgttatcaaatggggacatatttgattgaataataaacaaagcttcaaggagaaaagacaagaaatactcgtcaaacacatatatt

SEQ ID NO: 26722 - DNA, 610 bp, Arabidopsis thaliana columbia
cagagcctattttattgtgcctgaatagtaattatatttttcttgtagctgaaccggtgtcgtggaacagtgtctgtttacgagagcagtatttcaaagaacagagtggagctaaaacaggcacaatacaaggacatagataagcggcactttgatcaactgatccagctaaaggtaagacgtagtattaccttgtggtagtgcctgaatggtcaacaaattccactttatgttaaattgaacatttcattttggccagacaactgaaatggcaaataaagacttggatagatactacaatgcccttgacaagtaagcttctcgagtccttatataaccttctggctagttgtttttcattttgcactatctaattaacaaaatcatttaatctgcagtttttaacatatatttccatacagagcactaatgcgcttccacacaatgaaaatggaggaaataaataagattataagggaactgtggcagcagacatacagaggtcaagatatggattacatacgaatacactcagattccgaaggtgcaggcacccgctcttacagctacaaggtatgctacagaattgacaacatactttacgatgtga

SEQ ID NO: 26723 - DNA, 595 bp, Arabidopsis thaliana columbia
gaggatagctcatccctgtgtcttaatcctaaacaaagtcacaatagccgataacttgctgtggtttgaacagtttgggtatagtggggtttcagcgtccaatatctttgcaaggaactcatcttctcgttggtcttcacactctgcaatctcacttaagtcacccaccagattctcacctaagtcacctctacaagccaactcttcatcaaaaaattcagcagctttatataattcaaaaacttcctcattccactgatttagtttgctttgaactttatccactgacttctcatctccatgatgataccaatcactatgcagcttgtatgcctcatccatccctcttctaacaagatgatcaactacaacacagtcagactgccgtactacattacgacagtctttacaaggacatattatcatgtccatgtctcctaacaccgcagcaacatcccgtacaaatttccaagcacctctttcatagccaggatcagctcttcaatggataagtaaagaaaaaaatagaaactctaagtatcaaaccccatatgagacctaactataattataattccttacatgtttagatgac

SEQ ID NO: 26724 - DNA, 354 bp, Arabidopsis thaliana columbia
cggcgactgagatcgcatagtgatcggtgagtgtggcggccgagctgatgaaggtttccgatcaacggaagtcccggtggtgacggaggtgtcttacctttcttcccactcaactgtttttttaagaagagaatggtcatgaaaattattgaccacaagagaattatcatcatcatcattttttttattattttggtttcacagttcttagagatttctcttgttaatttatgttctgttggacagggttatataatcaaagtttttctacgtatgttacgttactagggtccactcagattttcttctttctttgctttaatgggcaaaataaaatttcatctcaaatggaca

SEQ ID NO: 26725 - DNA, 393 bp, Arabidopsis thaliana columbia
tgttgatatcgaaatccctgacactgctcatcagattagcagcggtttgtcattcgttttctccctctttttgttttgttatattaattttactgcttaagatttctcaatttatctatttaattaacgttggattagtgctcaatttcagtttctttattactattttttctttaaactatgagaatcatttacaagatagacagaaatgtgacctaagaattccatttgcttcttctttatgcatgtttgcaatattaagcggaactgtttagaagctgatatgatcgcatattggggaaagctaattagtaagttttgtggaatatacagattcatggtttcaggcagcgttcgttctgacaacaagtataaacagcgcatacgtgttgg

SEQ ID NO: 26726 - DNA, 314 bp, Arabidopsis thaliana columbia
gactctagtcgatacgatcccccgagtaaaaaagaaggaaagaatgtttttgaaaattactgtttctaacatggactttgattttcattacattgaggtaggttcggagccagctcggcgcggcaaactggacgaaccgtgtggttagatagccacgtatcagcacataattggcgagaccatggttgcaaccgggaactagacgagtcgactgagcactctctgtatcttcaaggcaaacagcacattccgttgatctagctagcacggctagctctctgtccggtgagtgtacggagttgctcgagctccaa

SEQ ID NO: 26727 - DNA, 525 bp, Arabidopsis thaliana columbia
ttctggactcaattttccaaagggcctcgattctctgccttatgagctaaggctcctccactgggagaactaccctttgcaatccttgcctcaagattttgactttggacaccttgttaagctcagtatgccttacagccagcttcataaactcgggacaagagtcaaggtaggctgactaagtctgggtatttatctgcaacttcgcttataacattactgtttcattcattttcaattttttatattttcaggaccttgtgatgttaaagaggctcattctttctcattctttacagctagttgaatgtgacatactaatatatgctcaaaatatcgagctaattgatcttcaaggctgtacaggattgcaaagatttccagacacgagtcaattacagaatctccgggtagtaaatctctcaggttgcacagagatcaaatgtttctcgaggggttccaccaaatattgaggaattcatctccaaggaactcgtataagggaaatacgaatattcaatgcga

SEQ ID NO: 26728 - DNA, 523 bp, Arabidopsis thaliana columbia
ttcagcaaacttctgttggtttaccaaagctttcgacattgatataaacaccatagctctcatctcactgtccttgtcagtttgttgaacaacgctcttcaatatatcaatcgcttcctcgtatttacccaaagcaaccttcatgttagcagcatcaatctccgcacgaatcagctccaacttcatcccccaattctttaacactctctgagacaatcggttctgctccaacgccttgtcatgttgctccaaaccactataaatcacaccgagtagcctccgatcctgcgcaacctcagctgaattattccccaactccttcttatgaatctccaacgccttcaacgcataaggcaaagctcattaaaattcaaaaccgcaacataagcatcagcaagactccgattcgcaacacccatctctttactatcttcatcaaaagtcatctcctttatctccaaactcttcttcaaattctcaatagcttcctctctccttcccatagcattcttaacattagcaa

SEQ ID NO: 26729 - DNA, 532 bp, Arabidopsis thaliana columbia
atgcctgcactagaggatccccaactcttatgagttctctttcagatctagatctccgtaacaacagcctcagcggaagtcttcctgaaatatttatgaatgccacgaagttaaggtcacttgacgtcagccacaaccgaatggagggaaagcttcctggttctcttactggttgctcttctctggaagttctaaatgtgggaagcaatagaatcaacgacatgtttcccttcgagttgaattctttacagaagcttcaagttcttgtcctccactctaacaagtttcatggcacattacataacgttgatggggtttggtttggatttcctcagttgcaaatcattgatgtatcacataatgacttcttcggtatcttgccatctgattacttcatgaactggactgcgatgtcctccaagaaagataataatatagagccagagtacattcagaatcctagtgtatacggttcctcacttggctactacacttcacttgtcttgatgagtaaaggagtatcaatggagat

SEQ ID NO: 26730 - DNA, 552 bp, Arabidopsis thaliana columbia
tttcctttaaaggtcagaaaactgtaaccattgatctccatcaataaaagacgtgttaattaatagagcaacttgagtctcattaagtttttgaacatatggtgctctctttgacatatctgctcctggacccgaacaattatactctccataaaatatagtcctgtaaacaaaaacaatgtcacttagtattaatcaaccttccttataacaaaaaaacaaatttatagaaaaattgtgttttgtacttacgcgtccctagagggatcgttgaagttgttccagccttcgggtgcgataacatcggtcatagtagtggaaacgaaaaccacacgtgagtaaggccgccatgcacgacctagccacacgtgaccagttccaccgattgtgcagttgacgaaggagaagccactgttctcgtccttggagctacgcccatttgcagtcacggctccgttaactgcttttgaacctgggctcaattgattagccattgatattattcgacagtcctacacatcacaatacaacatggaacttaattatattgga

SEQ ID NO: 26731 - DNA, 622 bp, Arabidopsis thaliana columbia
  unsure (1)..(622): unsure at all n locations
tnnnnnnnnnnnnnnnnnnnnnnnctaaaggctccagatttcaaccataattccgtcaacagagccggcgataatccagccgacgcgtgaagtatttgcatataacgttgtcgcagagcctattttttcaggcatcaagtcctgaaaataaagcatgccgataccacagagaataccaaggaagatggcattaagaatttgcaattccagctcaaccgccggagtcgtcgccatgagtacgctggcgtaaaaacacattccactcacgatagcaatgagcattaatagtcgcttgccaatacgtttcatgtaatagcctgcgattaacatcatcggaatttccagaccggcagcgataccaatcatttctccagtcagtttatcggttagatgcagttcatcaataataaatagcggcatatttatcatgtagagattattcgccgcccacatcattgaacagaccacaaaaagtagccgcgtatcccgcttcctgtgggtggagggtaaaatttctacgggttgggtacgacaggaatatttctttgtattgatggcaaaaacaacagactatcagtccgaaacaacaatgcgatggcaccggtgagatcacactttaaac

SEQ ID NO: 26732 - DNA, 638 bp, Arabidopsis thaliana columbia
ggcccatggcaataaaaccaaaccctagctggagtagaagaaagaaagaatatttgtcttggtggttatagaagaagaatcgtaaagatgatagaggtggtgcttaatgatcggcttgggaagaaggtgagagtgaagtgcaacgaggaagacaccatcggagatctcaagaagcttgtggcggcccaaactggaacccgacccgaaaagattcggatccaaaaatggtacaacatctacaaggatcatatccctctcaaggactacgaaatccatgacggcatgggtctcgagctctactacaactaaatcctctggtacgtgattttatgtgtcttatttaatgagacttgagatttagggcatgatgcttccggaatttgagattatctgatttataagattacttgctttttatcctttttagtttgtttaaaagaattataagattgaaattgaaattgaaattgaaattgtttcttcatatgtacttgttttctttagttataagattacttgtttttcttaaaattgtttcatcatgtgaattgtagtggctgaaattgtaggtttttcgatttgtaaaggaaataataggaaaaggaattcataatttaagattgaagaccagacctaga

SEQ ID NO: 26733 - DNA, 564 bp, Arabidopsis thaliana
ccagaaatagtatcgtgttccagttaatatatgtagtgtgtaccaaagttttcgaaagtccattagttaagggaccctgtttctgatgcttagaattccataaatgcaaggaaatctcgttgtctaagtcaggaacacactgcagcaagatatgatttttccattcagagaattctcctagtgaactatccaagtaaggtttagaattacagagcaattaaaaacggagacttgatgaagagagaggagaagaaagatggttaccttgttgccttcaataccaaactggaaaagcctgattccattggatttaaggaactggagattgctctctgggtagggctccgggcacaagtatcttcacaaattcgaaaaaacctaaaatcagcaatttcgaaagtttgatatatagtatacaaaatgtcatgaatgtggaaggagcttttacatgattgagcggagaccgagagtctggagaaaggagaagttagctgaatcagggaatccagaccggaatataccgttatcgaccatggagaagttgagcggcggaattaggtgaag

SEQ ID NO: 26734 - DNA, 495 bp, Arabidopsis thaliana columbia
gtctttgttcagctctactcccttgtcaatcacgtttctataccctactctatacaaacaatgcctccctcctcgctccgttataaacctagttagccccatactcgttcttgcgtcagtcactactgtacttcctatacttaaaaacattatcttaaagtcacataagttaatcaatcataaatatggattaacaaacgctgatcattaatgtaacccacctggatgttctttaagcactatagctgacataagcgcaataagcttatctccgttgataggatttcctttgttatccaccactccactcctgtcaacatccgtatcaaacacaaccccgagatctgctgagttctcaagaaccgcggctcgggtgtgttgcattgcgattttgttttccggattaggaatgtgattagggaacatcccgtcatgctttagatagagcgaaccgaatgtatcggctcctaacttgtctagaacgtcccacgtaaa

SEQ ID NO: 26735 - DNA, 812 bp, Arabidopsis thaliana
atatttcggctaactcgagctaagacaagacacaccttttcatttgtattcattttcacattaaaaattgatgtctcttttatttttctaatttcattaggataaaatttcatataaaccgtttcttttactaccccatttttccaaggttcatgtaaattttcgatcggagatgtgatagtcaacatgagtatgcttatataggtgattgaagtagacggttatagtcttatatatggtagtgtaaattactacttaagattcgtatacacatgctaaaatttggtttctgcaggatcaaaagagactatctccaaatcttatcgaaaatatttccctcactcttgacacatgcaaatacacttatataatttttatgagaattgatcttagccacgttcacgtcaaactatgctataactttttttttcacgcctctcctcttttagtcaaatgagagtgaaataggattttttttaattattattatttatttatttttgctacgtcaataggaaatgatttgtaaaaatgaattatatgttataaactttgacatcgttttagttaaagcatggaaaatcaaagatggccttagagttctgaagtgaagggtatgccagagcctgggagccacgcagtaccagcgatgaattttccaacagagaaagcagatgcatcggaagctttactcaacacatgaaaccctttccaacggacacgccacctcgtggatgaagccggtccgatattcttataatccgcatagaacagccgtgcgagaccatacgtcggacctttagtccacggag

SEQ ID NO: 26736 - DNA, 537 bp, Arabidopsis thaliana columbia
gtgagttctctaacattctgtagctggaacattttctctccattaaactgatggcttagaattcgaatgtttgtctatgtgttggctatttcagtctctctttgttttttaacacgacatgctacaggttttgcttcgggagccattaaatgaaaatgttattcccgttgcgaaggagtttgagagacgcttgggtgttgaaaacagggaacgccgtggtcagccagaatgaaaagaggactcaggtgcagaagttgatgctgaaaaagatggtaagtttaaacattacgatctcaaaacattcttgtccttttggcatatatatattttgtaatgcttttccataaaaaccgttctctattcgacttgtcgcgttgtcggtatctgatgtggtgttccaatcttagaatctccgtttgaatttcgggcactagaagtggctttggaagccatatgtagtttcttagctgcaagaacaacagaactagagaagtctggttatcctgctttgaatgaacttgcttccaaggtagctat

SEQ ID NO: 26737 - DNA, 567 bp, Arabidopsis thaliana columbia
gctctaataatatgttgactcttcattttagataaatgtcataaccattttctctctcagggcgaactctccttcatgggtactacacctggtgggacatcttcagactttgatagtcatgaaatatttcccgaggaacttgcaagtagcaaagtggattctaaagctgcccccctttatcagagattgctatcagctctaatttccgaggactcagccagtgtagatgaagatttacaatttgatggatttggagccgatgttgagtcacaattcagtgttttgaatcatatgatggagttcaatggttataggagcgatagactggaatttgatgagctagaagatgatgtgtctgttatcccgctcaagggtgttaatagctcagcacaccatgtctatggaagactttcagatcatttatccatcgacttctcagacattcagtatgaaactttggggatagatgagaagatttatatggaagctcaatctattggaatttgcttggaccccatggtatataccccacgagtttctgtgattcagaaatgctgcttgcttata

SEQ ID NO: 26738 - DNA, 385 bp, Arabidopsis thaliana columbia
gatgataagtcatctgccgtgatcttgccaccggtatgctcataccagagcgataaccggtaagcttggatttcgttggtgttgttggtattggtttggtagcaacctattgcaatctcggtgtcccgacaaccatccattgatctctggtttatattggctgatcctatcaaaatgtatgtgtcgtccactacaaacatatgacaatctctgtaatttaaatcttaagtgaaagtttgtgaaagtttaacgaatcttcaatatattttcatttcagattgtgaattgcggattgtttgttactatcatgagcttggagtggacatagaccatgaatctccgattcctctgcgcattccagtaatgcgttttctggtggggcgac

SEQ ID NO: 26739 - DNA, 1133 bp, Arabidopsis thaliana
tgaaaatgttatgtattggtggtgctcttcaggccatgcaaaagtaaggatcagaaactttactctctgcttctctaatttaacctttatgtaaaacaaactaagaaactcttatttgctgttttcctccagggaacaacatcacagctcggccacaaaatcaatgacaaatggacagttgatactaattttcagcatgatgatggttttgctctcctcgttttcgtccttttgctgagtctgttccatcatttacgaatctactctggtttggtattctgatctcccattagggctgtagatggagaatgtataactacaaacagcagttgggttcgttctgtttctctcatatttcattgattgttaggtactcatatcttctatcctcatgattctaaacaacgttagttcgtgagggtttgtgtttagagctttgttcttcgtagttctaggtcatttggagttcaaaactttggcaacgactgtaactaaagttctcatttgtgggtcttctacattaatttctactattatcctcgtttctggatattcaatatgcaatgctacttctgtttgggacaattattaggacatgtaacattcgaaaattcgtttcgatcatgtttttgcagtggtactgaaatctcgttcttccatctatagctaaaacttcagtttcataataggcataatgagttatatattcaaaagtataaaatttatatcattgcaacttaaacacgaaaaaccaaagacggtctttagagtccagaagtgaagggtatgccggtgcgtgggagccatgctgtaccagcgataaactttccaacagtgaaagcagatgcatcggaagctctacccaacacatgaaaccctttccaactgacacgccacctcgtggatgaagctggtccagtattcttatattctgcatagaagagagtgtccagaccagacaccgaaccttcaatccacggagaccacccgactggactcacgacattatccaaatacgtctgaagaaccaaggttcgtgagaacttcatccaaggccggcccatgtacgtcttaacggtaccgaccactggttttagatcaggagccggtagactcttgagttatggatagag

SEQ ID NO: 26740 - DNA, 626 bp, Arabidopsis thaliana columbia
ttcttgcatattcatcctctctatctggctgcagaaaaatggaaggaggtaagaaaacacttttatcaactttgtaagttagattggggaaagaaaaggaagttcattttactttgtgatcaactgacaagggcatggcttctttgccacggaataaaaccgccctcgaatcaccgcagttagaaactactatatgtgatgagcaaaccaaggcaacaacagcagttgatcctacggtctcagacgcaacagcctcaagaaccttatcagaagaaccaacaacggctctaccaatttttccttcaatctcaccatcgacagttagaaaacaactcgtgaagactttatcccactgcacctgcctaccctctcctgtattcctcttgcataattcgtcttttatacgttctatttcttcagccaaagcaaaatggagtctatctcggcaatagtcagcaacgctacaagccattgtagatttaaaatctatgaatttaaccagaacatctcaaagaggtgtatacaatctacattgctaaaacaacttacataaaatgtgaatatagcataccttatggcgtccatgaccatcataaacaccgaaaaaatgactggtgaggtgtgtg

SEQ ID NO: 26741 - DNA, 521 bp, Arabidopsis thaliana columbia
tggcccttttaggtagagttagtcgtatggaaataaattctccattcgaagcttggagaaagtataaaataaagtatataatgttcacttggcttaacaatcgccactcgttcactgcacattatcttaatttatatcaaattactattgaaagataatagaagataacgtgcgtgtatctccaatatataagacgtcacaactcatcacttgctctgtcttattagaaggaagacaagaagagttctttgtgtcgtttgtttatgcatcaaattttgcagcagaaagaaaggatttgtggagtgatattaaatatcatcatgattcccctttgttctataacaaagcttggttaatatgtggagactttaatgagatattagaaggagaggaccattcactctatgaatcatctccattcgttctccaagggatgagagattttcaagacttaatcagacattgtgaattaacagatatgagctaccaaggccagagatacacatggtgtaacaagagaa

SEQ ID NO: 26742 - DNA, 725 bp, Arabidopsis thaliana
agtaacggcgccagtgtgctttaaagtaaaaactggacgcccggcgtgagtcatgctaacttagtgttgacttcgtattaaacataccttattaagtttgaatcttgtaatttccaacgcttcccgttttatcttaaatgcgaagtgaacagatttctggctcgtcactcaatccgtcttgtcgtttcagttctgcgtactctcctgtgaccaggcagcgaaaagacatgagtcgatgaccgtaaacaggcatggatgatcctgccataccattcacaacattaagttcgagatttaccccaagtttaagaactcacaccactatgaatcttaccgaattaaagaatacgccggtttctgagctgatcactctcggcgaaaatatggggctggaaaacctggctcgtatgcgtaacgaggacattatttttgccatcctgaagcagcacgcaaagagtggcgaagatatctttggtgatggcgtactggagatattgcaggatggatttggtttcctccgttccgcagacagctcctacctcgccggtcctgatgacatctacgtttcccctagccaaatccgccgtttcaacctccgcactggtgataccatctctggtaagattcgcccgccgaaagaaggtgaacgctattttgcgctgctgaaagttaacgaagttaacttcgacaaacctgaaaacgcccgcaacaaaatcctctttgag

SEQ ID NO: 26743 - DNA, 544 bp, Arabidopsis thaliana columbia
ggaagtgttgaatccattgcttcaggaccttgttaagacaccattttacagatatttcaaggttggttcatatttcttctttgatcatgaaagtatctagaggatttggaggtgtgttgtgataggtttgaatgcgtttaataggttaaactgtggtgtgattgcccgttttggcctgatgatggcatgtgccggttaagagactgcagtgtttgtgaatgtcctgaaagcgagttccctgaagtatttaagaagccattaagtcaatacaatcctgtttgtcaagaggggaaccgcaagctactgttgatcgtaccttggatactagagcttttaggggttggacagtcacagacaatccctggaccagtgatgatgaaactgacaatggtaacttttctttacagtctacttcatttttgattcttacatgtcgaaactctatcgctacttcatatataactggctcatgagatgatatgtaacaagtaggggttttagcacgaatgctatgtgtagatgcagttttgatgactgatatatg

SEQ ID NO: 26744 - DNA, 1283 bp, Arabidopsis thaliana
caggtgagtcctgtcataatcaactgcaacaacgagaggcgggtgttatttctttgaaggcaaaataactaaaacggcatttctttattacattggaaaagtaacttaaattttagccaggtgggaaacagtgaaaaccttcaatagaccaagtagaattgagacccttgttgcatcacctgcggctgaaaagcagcggtctaacaggaaatgtgggatggggggagaagttaaaaatccagtcgtgagtttcgaagtgcaacaaagccaatattatactatacagaaagtttatttagagaagaagaaaacctgcagtattgatggtgcataataaagcacacttggttgtccagttatctgccattagacaagaattcattagtaattattctttcaagagaacacaatgattagatttgactataccaacctgctgaaacaagactagacctcctcctatgatgagagctttcaagcacttcccttgaaataattcaccaaatgtgacttctttatcctcgcccacaaaagttagttcagccaaaatctcatttacttgttcagcagctgaatcaacaaaagcagggcctctaaggcagcagagagatttgattgcagcctctcgttggttctccacattccctttcccctgtatgacgcgcaacaaaagccacctaggggatgctgggagccaccacatcccaattcccataataactgccaaagggacacttgttgcatacatgtatcgccaaccagaatgaacattgactgtaagactaccgattccataacctccctgtgtaaaattttgtatggggatatgtgagattaacttggtgaacaaagatttcaactcaactgcttcacataaagcaatcaacgtcctaaatctcagggttgcaggaacttacaaccatcccaaggactatgaagaattcctttaatgataccagctgtccacgtatcggacttggagcagtctctgcaatgtacatcggagccgcatgcattgcctaaatgtagggaaacaattcagttcccgtagcaagagtactgctatatgtaatccacagcaaaagcacatggataaacaatattttcgaaaggtaaacaagatttctagtcactggcttttaagctggaaaaacataaaaaatacgaaggacgaagaatacagtcacaatatatgtgtactctgtatacatgtacatagaatagacatcaatatgttctatgatgatcactggatacacccatctcacaatagatggaatata

SEQ ID NO: 26745 - DNA, 437 bp, Arabidopsis thaliana columbia
attattgtcaggtagtaacttcggatgtggaaaggatcttgacaaagggagcgtatatgttgttctacgcaaggtaaataatattataatgcatctctcacactctttaaagttgtggattatgctcgatctggttacttatgatggtatatatcgaatgaattgactgcaggtgcactccaacgcctccaagattagcagtatgtaccaaaactgaagcatccaataaaaaaagcagagtgccactacctaaggctaatgagaaaagtaccatatcccggtctgtgtctacttcaagtcctgagttgtcttccaacacgcctggtggtggtcgatcggcaatatacagtcattttattctagtttccagaggctgcagaagattttagaagaagactcggcgagtgacagttcatctctgtttgacagcaactcag

SEQ ID NO: 26746 - DNA, 562 bp, Arabidopsis thaliana columbia
tccctaaaatgactctctttttccatggacagggccatacaattaactgaagcactgcgtatgcacgatggaagttcagaagcaattgcatgaacagctggaggtaaaaccgattacacttaacttggggaaaagaaatattgaagatttgctactataaccagtcccataattgatcaatgtgcaggtgcaacgggtgcttcagctacgaattgaagagcatgctaaatacttggaaaagatgttggaagaacaacgcaaaacaggaaggtggatttcttcttcttcgcagacagtgttatcacctagtgatgactctataccagattctcaaaacatgtccaaaaccaaagcatcttcgcctcagccgccattacctgcagagaacaaagcgtcggaaaccgaagacgataaatgtgaaagccctcagaaacgtcgcaggcttgagaacatagctgaatctgaagatcctaagaggtagtaagattcttcaagtatgtaaatatggtccgttttgtgtaatttagtgagagagagagtgcactcaaaatatatgtttgta

SEQ ID NO: 26747 - DNA, 574 bp, Arabidopsis thaliana columbia
gataactaatctagctgtatcttcttctctcagtgggtcttttgggttggaccattcattggtgctgcacttgctgctctctaccacgttatagtcatcagagccatcccattcaagtccagaagctaaagctgattgagttctatttaaaatctggcttttgttcttagtttgctttcttttgtgaatctactacctgtgtgtaacgtgtgtatctgttgtcctcttctttgcctaatggagacttatgtaaaacaaagacatgccccagaaacatctgttatctttcttctccattttatcagaggatttctataattggcccattctgggtttatctcaagcaggcaacttatcttgaatcaaagtggaccagacatatttaatgcatttatgttataatctgctacaaaagaatagtgccattacaagtgaatcattcatgccaaatgttatctgacaaaattggctcaaattcaagaaaacgactcctataaataaaactaggaattgacaacgggtaagattaaatggcaatttcaaaacctggaaaatgatttgtaagaacaattgt

SEQ ID NO: 26748 - DNA, 606 bp, Arabidopsis thaliana
actctcagatctagccggccctgtccatggaaaaagagagtcattttagggataatgttgaaaaatgtctgcggattgaacatggaattagagaaacacaatgctttaccctttcttcttctcgtcagcttcactcttactcaaagccagtttcttttcttctgagttatcagtccttttctctggggaataaacgaaaaataataaaggaactgtcagatagatcaaaatcatggctgatgatcatgcagaaacagagaatctgtgaaatcacaataacaagttggaggctttaccttcttttttctctggcatatacttggctagtctatacttctgcacattcgtgaatttcagagatattcagctaatttggtatcatgtacttataaatttatcacactcaaactgatttagtacctgcaagtggctttttacatgatagatcgtcaagccctcaacattcatgagcttcttaacagcctttggagtggctctacatgtttaatgcaaaaaccgggttaagcgttatcagcagaaagatgagaagaacaaaggatatctaccaatggcaacacaagagtagtctagagttctctttataag

SEQ ID NO: 26749 - DNA, 537 bp, Arabidopsis thaliana columbia
  unsure (1)..(537): unsure at all n locations
tcaccaatgttagagttttacctcgagctgttcatgcaattgcttctgtacttccatctgcagacggagcttctgctaactgtacggctctgcacaaaaagtaaacagaaaaacttttaagaaaatgtttgaaaacatatcccacaatccaaaagttattcgaagctgctttcttctcttctcaataaaaaaaaacaatgaatcaataaataaactttctcagatgatcatatatgacctagaagcagatgagggaacaagttaccttgttttctctctggcatatacttggctagtctatacttctgcaaggcaaaaatacagcttcaaagataattcagcttatgtagttgacatttctgtcagggtcagatggcttttcacttgatagatggtcaaactctcaacattcattagcttcatagcagccttaggagttgtctctacatactatgaattttgacttcgccgttttccgtcccgtttctagttccgtacccgttttggtgnacttagtcttttaggccttgaagcttg

SEQ ID NO: 26750 - DNA, 533 bp, Arabidopsis thaliana columbia
tttgcagtaacaaaattcagtcaaaacttaacacaactcttgttttttctatgtagagatgtgtaagattggaacgacgccgcaaaacgattggtacttttatagccataaggacaagaagtatcccaccgggactagaaccaacagagccaccacggtcggattttggaaagcgacgggacgtgacaagaccatatataccaatggtgatagaatcgggatgcgaaagacgcttgtcttctacaaaggtcgagcccctcatggtcagaaatccgattggatcatgcacgaatatagactcgacgagagtgtattaatctcctcgtgtggcgatcatgacgtcaacgtagaaacgtgtgatgtcataggaagtgacgaaagatgggtggtgtgtcgtgttttcaagaaaaataacctttgcatgaacatgattagtagtagcccggcgagttcggtgaaacgccgtcgttcaatgaggagactatcgagcaacttctcgaagttatggggcaatcttgtaaaggagagatagt

SEQ ID NO: 26751 - DNA, 467 bp, Arabidopsis thaliana columbia
tcggtcgcgtcgcggcaatcgccgaagcgctccagacgcgcttccagccgcgcctgctccgcttccaacgtggcgaggtcgaaggcgggcgcgcgtgcgatccagtcgagcgccgcctgccggaacgcggcgaccgtatcgtcggcgaaggcgtcggccccgccgatcaggcgctggtgcttgccgccctatgtgcgccagacgagcgcccggtcgcgcgagtcgaattcctccgcgcccctgttggtctcgatcacctccggccccgagaccgagatgcgaccgccttccgagacgacgagtcgcgagcaggtcgccgcgatcaggccgccgccgccataggccacggccggccgccgatcaggccgatcaccggcacgccggccgcgcgcacttgcgtgatcgcacgcatcacctcggcgatcgcgtctcgccggcattggctcctgcaggcgcacgcgccggta

SEQ ID NO: 26752 - DNA, 576 bp, Arabidopsis thaliana columbia
ctcttggcaaagttgacgatcctcaagttaggcaatttatagagaaatgtcttcttcctgcctcttccagaccaactgccctcgagctctcgaaggacccattccttgcaagggatggaggcaaggactctgctctgcttgcttcatcaagcacatcatctaaatatgtgagaccaccacagcttgaacatcttcccatggatgtggatcataacgagaataaaagtgtttcaagcaacgaagactacccatggtcccaaaccattgaacttcagaggattgcagagaataaagagttcaggttgagaggtgagaggagcgatgatgtcacagcgtctatggttctccgtattgctgacccgtctggttcgtcttataaaattaaatcttctatccaattcattcctctcacagttttcatttactgaaaatcaattcaatgccctaatacaggtaaatgtagaatcgtacactttgcattctatctggagtcagacacagcaacagcaatcgctgaggaaatggttgaggactgcatttactaccaagaggtcgttgtgatactgatatgacgat

SEQ ID NO: 26753 - DNA, 751 bp, Arabidopsis thaliana columbia
cgcattagtaaaggtggacactttactagtgatactatcttgtctattttaaacatgtgtacattcatgtatttgtgcggaagttcaggaaattttgtctgaaataagcaccaaaatagaattttggtaaccggccaagttttttctagaatttcaatgtatcagacaaagagggtccgctactcattaaagaagacaacctaggtagttaaactttgatacaattttcttgataaactgttaaaggtggaaaattttcaagtcacaacaggttagaattagaaatccgtctctcaatctcccagcttagtagtagtggtttccttgaagctcttggacaaccaaatcgctgtttctctgggtgaaactttgcctggaccaaatggtcttaataagacattgagctcatcgtacctctcatcttgaagcaaccttgcactgaattcaagcaatccctccaatgcctcggctcgttgctgataagagctaggatcaaatctttgtctccttacacccgacgaagccctgcttgatgctccagctgtcgcattttgatcagatgattcactcctgtcttccagatatgcatcttcttcatacaccgccttcataatcgctccttctctgttttggcctggttcaagagtaaatttgtcttttgtgattgagcagtctagtggtggctctggaggtggactgtaggaactctagacgatgctttctttttcttccacgcacaaccgggacaaaa

SEQ ID NO: 26754 - DNA, 1117 bp, Arabidopsis thaliana columbia
tcattgtatcagatacaggagttagcttcaaagaacacagcctaagagtcaaacaatttatctatcaaatcgtggaaacgtcatgctctcaaaaacttttaaggagttaaaaccctgtttttcaatcttcttccaagttactaggactactttccttgaagcttttagacaaccatatcgcggtttctcttggcgatacctttcccggaccaaatggttttagtaacacgttcagctcatcgtacctctcgtctataagtaatcttgcactgaattcaagtagtccttcaagtgcctcagctcgttgtcgatatgagctagggtcgaatctttgtcttcttgatgcacctgaggaagctctacttgatgctccagcagttgcattttgatcagacaaatcacttttggtttctcgttctggttcaagtgtgaatttgtcttttgttattgagcagtctagtggtggctctggaggcgggctgtatgatcctctggacgatcctttcttcttgcgaacaacgggaatgaaaggcatttcttcatatgaagctaacgggaacttgatcctgtcgattcttggcgagtttactgacacatctggagaatttagctgatggagtataccgatgttcgggtggtatagagagtcttttgttccttttgcaggtttctgtgagataggtaaggaggccctacgagtcactaccgcaggtttctgatacatcagatcgaatatataatcagactgaatcagcagttagtaagataaagagcatttggacgaaccacttaccagcagaccaccactcttaggctggtttgatctcactggcacatattttgaactgttagaaaccactgaagaaacagcgggtctacgaacaaccactctactagtgtcatttgcagacaaatccactggcctgtgacggtgtaaatacgtgtgcacgggtttaacagaagaaacagaatcttcttggtcaacaccgaacctgcttggaccgaagctcacacttttgccagaagtacgctttctctgctgaggatagctacttctcctttcggattcagatggcaatgtatcgtgttccggaagctcacttgagaagaccttttg

SEQ ID NO: 26755 - DNA, 407 bp, Arabidopsis thaliana columbia
cttcgtgaatgaggtacaagtctttagcattggtgaaatctcactttaaggaggctggctatgtgttccagacagatgatggtaccatttaaagagaaccagaactcattcatcattgtcttctgcgtttgaagaatggagcaccaatcactcaccagattcttgttcctattctaagctcctttgggaatattgatattgtaactttttttttcctcaaatacaagtagaaaccatggattgcaagaaataatatatttgtatcgttcgtgttgttcattaaatactcgcggtgagacttatatgaatctgatgggcccctccagccagagagctaggataaatgttggatggcaaatctacaggggtatgggatgatatcatgtctcacatgaatagccgtttgt

SEQ ID NO: 26756 - DNA, 504 bp, Arabidopsis thaliana columbia
ctcttacagctcggaccacaagtgcagaattccccacattcaaataccacatgctttcctttcaatagatgcccgttatcatcatatgcaaactcaccaccgttcttccttgcacagagacaatcatcagtacaagagagcttacactcgcagccagtcctgctgatccccccctgaccaaaaattccaggaggaaagacagcttttgcaatgtactcataatgtctcggttcttgatcaccatctacatcattatatagaaacacgggtacattctccttcttgttagaaaggtcaaagctaacataaccagtaggcctaaccatcgatggcttatttctaagagtttgtgcaaacctcattaccgcactgcccatcatcggttgcccttcaattcttactaacctaaatttaaaaaccccaaaaccagacttccccacagcaaaccaccaatctactatcttatacaaaccatcatatacatacaccttcgagcttatactg

SEQ ID NO: 26757 - DNA, 391 bp, Arabidopsis thaliana columbia
attcacatgtgtaacacacataacaaacatctcgctaacaaattcaacactaacctcaactgcaagtacccgcccgattgatgcttccgattcattccatttcatgtgagaactgagcccatacctaccccccgtcctccagtcaagcagcccaagaagaacctcaatgagaccaaccctaccaattttcacaatcatttgtatcagacaattagatatatctcacccaaatccacttcttctaaacgactattttccacaattttattctgtaactaggtactgtcagattaacacttcagcagtcttaacagagttttgcagttagagataattaagatgtgagcacccgtcagcttgagtaccaaagacattatcatatagtaacatg

SEQ ID NO: 26758 - DNA, 452 bp, Arabidopsis thaliana columbia
tgcttatatagagtatagtatttgtgtagatttcttaccagaatagtcatttcactgtttctagatacgttattcagaaactgcgtgtcttctttgttgctatgactgacttgtttttttcaaatggatcgtagcattcctgggcgttctgagtcattttggaaggaagtcaatcacgtgaagggtttatggaagaatcgggcggatttgaaggttgaagatgctggaatagctgcactttttggtctggaatgctttgcgtggtactgtgcaggagagattgtaggaaggggcttcactttcaccggctactacccttgaagaaagaaagcaaccccctcataaacaaacatgcgtttcagatccattgaataccgaaaagcctttttatatcataattagcggcttattatctatctcactgctgacattagaagcaaagttaatttctg

SEQ ID NO: 26759 - DNA, 542 bp, Arabidopsis thaliana
ctgttccttcgctctctggatcttttgcattggcggttggaataggagaggaagaaatctctgtagtaattttctatattgtccaacaaacacataagatgaacagcaatgggaaattaatacaacaagacataagagggtcgtcaatactttttaagtaatacctctaaaatactcctttgcagacccataaagatcccacacaccatcagaggcttctaaattcacattttgtccaccatctctacgaatgtggtcgtcatcttcatctggccaagagagatctccgttcactgcttctgactggtatagtgtgtattccactgataactgtaaaattcataaaacaaaattactaggtaaactatgcatcaaatgaatgtatccatcactctaaaacttaactataccagtatatataaacagtatttaatgttacttacattagcagcgttttcaacgtcaataacatcttactcccggagaaagatggtgcgaccaagatcaactgcaggcctttggataaaatttctgaaatatgt

SEQ ID NO: 26760 - DNA, 582 bp, Arabidopsis thaliana columbia
tgaaactcgagtttttttttcttttcgtgaacagacatttgaggacgcagatgtggatcgggatggaaagattgataagacagaatggagcaatttcgttatcaaaaacccatctttgcttaaaatcatgactcttccgtatctcaggtatgtctccttactatgatacttccatctatttggccagttttggtgccattttccaagtttgaggacttaaaaactcaattttagggatataacgacgacatttccgagtttcgtatttaactcggaggtggacgagattgcgacgtgaaagagacaagacaagctggtttatagagaccaagtcgtaggctggaccaagaataaaaagaagattgattccaacaatgttatatagcaggatcgagctctatttcctttggaatttttagtctattggatttcaatttcatgtattgcgattacttttggctctctttctttaacagttttgaatactcaagttgtagttctcgaaaagattaatataaaccacaatttctgattaaagatttgattttgctcataaattattccacactttatgttttatgt

SEQ ID NO: 26761 - DNA, 500 bp, Arabidopsis thaliana
ctagtaacggtcgtgctctaaaggccacgcgttaaagactgaacctgtccagtcgctggtgcggtggcaacggcgggttttctgccgcgtttcggggaatgggtgcgaccatgacagtctcttttttctgtatcgtggaaatcattttcatttttattgttagctaatgcaatagttactgaactgatccgatgagttaatgttgaacaaatctcatgttgcgtggtggtcgcttttaccacagatgcgtttatgccagtatggtttgttgaatttttattaaatctgggttgagcgtgtcgggagcaagtgtgagcagcaaagtggaacaactgcgtgcgcagttaaatgaacgtattctggtgctggacggcggtatgggcaccatgatccagagttatcgactgaacgaagccgattttcgtggtgaacgctttgccgactggccatgcgacctcaaaggcaacaacgacctgctggtactcagtaaaccggaagtg

SEQ ID NO: 26762 - DNA, 407 bp, Arabidopsis thaliana columbia
atttcgccttatatattttaaaattcatttatgtggcgaagttgagttaggctggtctaacaattagcgcaaacgtgtgtagttgtagcaaacgaaaacataatcgcccaaaattaaaaaatgtatatctctaatcaattgatattcgttttggtatttgtttatatacctgatcttcactataattatcatcatcttgttcaaacatcaccaacgtatcctcctcctctcattgcctctaccattttcttactcaatcggtcttcatccataatagcatcttgtggctcacgcttccccaacaatctcaaaacatcaactgtactctcaatgtctctctggccctccacatattgaacacatgcgtaccagacaatgcaagatttttcttggggtcccatccgtta

SEQ ID NO: 26763 - DNA, 447 bp, Arabidopsis thaliana
gtctagaggatattacaaccagtcccttgtgcgagagtagtactaggatccgcccattgcagcttcaatctgctgcttcgccagcttgccatcaaacggagcaactttgtcctgcaataacgccagctgatcggcaatatgcggtggaaaaagatcgcggcgggttgataacatttgcccgaacttgatccaaaccggccccagttcttgcagggccagtcgtagtcgctcacctaaaagtttgtctttatgccgatttggcatccagaataatgagtatcgccatagccgtagcggcagggtgatacgcattttggggatcagttcatcaagtccgtagcttaaaaaagtgcgaatgatgaaatataggcgccgtacttcacctggcgtcatttagccccagttttccagccgtttggtcagggcatcacagcacgctcgacggca

SEQ ID NO: 26764 - DNA, 426 bp, Arabidopsis thaliana
  unsure (1)..(426): unsure at all n locations
nnnnnnnnnnnnnnnnnnnnctaaagcgtgaagcctgcgccgctagagccacgcgtcgtctcacccgcctgaagcgttccggaacgcctgtgcacctggcaccatcgacattgttccggtggcgaacagccgcgcgtcaacatcagcgcgcagcattagcgtcgactaccccattctgctgcttgacgagcctacggcctcgctggacgccaaaggcagcgccgcggctggtggaactgattcgcgacgcataacccgtggcgcacatcggtaggcatcttccatgacgaagctgtacgtaatgacgtcgccgaccgcctgcacgcaatgggagcctcttcatgagtatcagtaacgttaagctggtgctgggaaacgaggtggtaagcggttcgctggaggtgcagaacggcgagatccgcgcct

SEQ ID NO: 26765 - DNA, 515 bp, Arabidopsis thaliana columbia
ttgatctgttttgatttcacaactgagaaatttggaccgcgtttgcctctgccttttaacgctaccgagtcttttacttatgatgatgttgttactctctctagtgttggagaagagcagcttgcgctgttgtttcagagtgatgctacattgatgatggagatttgggttacgagcaaggttgaccccacagagggtttgtggaacaaattgttcttagcggttgatcatgatatgatagaattcgactatgagttaaagtttgtggcagacgctgggagtttcttcattgaccagaagaagaatgttgttgtggtttttgataaagatatgaatgagcatacccatcgtggcatggcttacattgttgggaagaacggatacttcaaaagagtggatattggggaagaagcatacacgagttgttcccacttgtctgttcttatgttccaagctcagtgcaaatcaggcagctaacctgattacgttcgttttctggcatcttcgattgtaga

SEQ ID NO: 26766 - DNA, 548 bp, Arabidopsis thaliana columbia
gttgaacagcggaattattccacgagtcaacaattatcgtcaacatggaaacaacaagaagatgactcttgaacttaaataaacacacatttattatcagagtggttttctaaggccatccccagaaagccaatgattcaccgtgatgatcgtgcgacggtgaagtggtgggcacaaagacgtcggcgaaacagctccggtcattgtcatgatcactggcgttgctgttgtcttggatgggtacgatgcttgggaagtaagagtcacagctgtctagtagttgaggtgcgtcgtcgtctagtaccgcgctcccaacgctccctgaacttaaccggtcctcggttttgattgctgccgcattaatgtaaaccggatcaagttggtttggttcgggcacttgaccaggtggttcattagctgtctcttgtttgccctgaagcttttcggtcagggaagtaactgtcgggttggaaagatctaactttaacacaacggtcacacaagcaacctcctccataaaaagataattaactcgttgattgatttga

SEQ ID NO: 26767 - DNA, 486 bp, Arabidopsis thaliana columbia
gtcgtgcttgttctggtggagaaaggagtcgttgttttgtgggctcttgtgttatgttgtgaaataggtttggtgacataaaggcccatttctatgatgagcttaagctaaccaaattatacatttattgttagattgcctctaacattttcacaataccttgtggtgtgagtctttgagatactgctaccataagataagaccgagatataataaccacgtgctctctattaagatcccaagcgtgtgggtcagagtctaactcgattagagagatgagaaaacttgttcgaggcttcgaagaatgtcgatgttaatggctgtcaaaacgacttcactctgttgtagcagctgtaaaccttacagcttcaccaacattccgacggaacccacgcgcggcgagattggtgaatccgcagcgagaatccaacacgttttcatcgcctgattgaagacaaggcattgtgcttatgcctggatgctacg

SEQ ID NO: 26768 - DNA, 593 bp, Arabidopsis thaliana columbia
  unsure (1)..(593): unsure at all n locations
nnnnnnnnnnnnnnnnnnnnnnntaaaggaccagcaatctgcttaatgcgcgcaaacacctctgtcagctcgctgacattccccgccagacgctgattttccagctcagcagtcgctttacttctgctaacataaccgggatcgcggcgagacagggtaaactccgccagaccaatcggatttgaacgataagaagaggtttcaccggaaggaatcagttcgtcggtggtggtcacttcgtcgaggatcttcgagcacactttcaggacgatattgtcagtcagcgcacccaattccggccagtctttaatgttcggcccgtaaatcagcggttgctgagttgcccctttcacaaagccctgataaacacggtttttatacggcgttacatcgaaggcgtactccggcacgttgtcccagcaatcaagttcgctggcagaggttaaatagccaccgtttgccgcagtcgcagcgatagaacgagcgtccatcaacgccaccgctgacatctgcccattagctggcttagagcattcgcggttcgggaagttacgcgtggtgtggcgaatactcaaaccgttgttgattggcgt

SEQ ID NO: 26769 - DNA, 527 bp, Arabidopsis thaliana columbia
gtccaggttattattactacctttttttgttgtttttgttgttttgctaggttaagatctttaacttgacaattgttctcttatttgcagggtgtccagactgttcaaggttggtaactcagtccttttgttcatgtataagactcaattctctcaccattttcgctgaaagtgttatattcatgtgtgtaggactattatcaacggttaccaaggcacagccctgcaaagatgggtcaggcccttttcatctgatagtggtatgattgctctagctgaaacttttccctttatgtcaagttattttggtttttctgtcccatgttttggaacaccagagcttagtcttatgatccgtgtgggttaattggatttgctctttactgttattgtaacttgtatttctaggctttttgactcacacttttttgtatatgtgattgaaggggatgtcgtggaagctgttgtgcacacatgggtgaatcaatcactgatggcacctagccgcctttctgaagagtatgctt

SEQ ID NO: 26770 - DNA, 484 bp, Arabidopsis thaliana columbia
tcaactcatctgagaagtcttcttcgtatgaagcagtatctgacactgtggttactaaacctgaagagggtacagaggaaatagttttagaagcaacagtttcagagaatggctttgagccgccggagatggaaagcacctggaatgaaggtatcgtagaattggctcaaaaacttgatgatatagaaggcaagagagaagtaccatcaatgcaagggaagtggaaaggcctttaccctgttgttttcttgagagatcaaacagggatcaacgggatcaagacattttacggcattaaagatgaatcgtttccgctgtatggtcatctcgtgactagaaacagcgacataagcagccacggaaacgtgaaaaggatttactatgtttcgaaagcagttaagaatgttcttgagcttaattttgcagttgggaaccgctcaagatctcctctgttggcctcaagatgtttgtaagtacaatatag

SEQ ID NO: 26771 - DNA, 107 bp, Arabidopsis thaliana columbia
ctgcagtggcgcaatctcagttcactgcaagctccgtctcccaggttcacaccatattccagcctcagcctcccgagtagctgggactacaggcacccgccaccacg

SEQ ID NO: 26772 - DNA, 574 bp, Arabidopsis thaliana columbia
  unsure (1)..(574): unsure at all n locations
nnnnnnnnnnnnnnnnnnnnnagtaaaggctataaatagctcggaaattaccgcccaggataatctgctggtggtgaaaggtgctcacgccgacgaacaaaaagagcgcacctatctgtaccagggcatcgctgaacgcaactttgaacgcaaattccagttagctgagaacattcatgttcgtggtgctaacctggtaaatggtttgctgtatatcgatctcgaacgcgtgattccggaagcgaaaaaaccgcgccgtatcgaaatcaactaattccctaaggccgcctggcgcggctgtacatctccatgctcgccgtcagggagcatatgcgaatcttcggatttgcaggtacttactcgcttcttagaaggagaaatgactatgcgtaacttcgatttatcccactgatgcgtcaatggatcggttttgacaaactggccaacgcactgcaaaacgccggtgaaagccagagcttcccgccgtacaacattgagaaaagcgacgataaccactaccgcattacccttgcgctggcaggtttccgcagaagatttagagattcactggaag

SEQ ID NO: 26773 - DNA, 581 bp, Arabidopsis thaliana
tcagaatgatacaaacaaaccaaacttgaatgggtattgggcgttcgacaaagagggcattcttgcttctcgttgcaccattccataatgcagctcctgcacatgacaacatgactttcaaaatgagcacaatgttccggtgtcaacttttggatcttaggttttgtagttcgagtaaatgttcgatacaaagttcatcttatcaaaagcagtttcaaccaatggacatcaagatattgaaattctctggattctgaaacttatcaaggtttgtaggtgttaactcgttccagatcaggcccaggacaaaataagcaattacggtagaggaaggtttattaccaacaaaacacatgaccacaaggagtggccgttgggtgctgacgggtgcttaagcagagagtgcatttccctactgcctgcaatcgaagtacatagcaaggtaaacacctaacataacaagtggtaacatattgatttcatcaaaacgagagaaaaataaacccctctggagtttttttaaatttagaatagtctcaaaataggattacatataaccttgtccgctagaactatatgta

SEQ ID NO: 26774 - DNA, 652 bp, Arabidopsis thaliana columbia
ggtgtgtttccatagcagagatatggggaagaagaaaggaaacaaagcagcagcttcaacagatgattttttacaaaccctcgaagatttcaccagcaaagagaattgggacaaattcttcactctcagaggcaacgacgactctttcgagtggtatgctgagtggcctcagctccatgactcgcttttacctctcctccaagattcttcatcttcttcttctgattcgcttcagattctggttcctggatgtggaaactcccgccttactgagcatttgtacgatgctggattccgtgacatcactaatgttgacttctccaaagttgttatctccgatatgcttcgtcggaacattcggactcggcctgaactgcgttggcgagttatggatataacaaagatgcaggttttggttccttttgtgctctgtttttttttggtttctagctgatccttgttctgtctctcattcactaaatatttttactttttctattacgcagttggctgatgagtcttttgatacggttctagataaaggtgctcttgatgctttgatggaccagaagttggtacaagctgggaaacaatacttacagaggcttagtgaactcttttgtttagggattcataaattggatgagtgttg

SEQ ID NO: 26775 - DNA, 539 bp, Arabidopsis thaliana columbia
tcatataaccagatactttcctagcaattggtggacaagaaaaattctgatgacaataatgttcttaccaatctcctaagcactgcatcatccaactcctgtggcttgttagtagctcctgcaaaacattacatcaaagtaaatttttaggaaaggaaaacagactatatgtaaactgatactccgagatgttaaacagaatgaagattgagtttgatgtggactgatttagcagaaatcataccaatgataatcaccaaatcatcaggattagaagtcacaccatcaaactggataagaaattctgatttcagccttctgcttgcttcattctcactggttgaccttgttgacattatactatctatctgataaccagagcaaaaacatattcagatctccaagtgacaatatgttgatatgaacaagatcctttttcagggatctttaggtcttcagtcaaatacaacttatatggtactatctagaactctggtaagagtagatctcccatataagacagacacaggaaaaagtgt

SEQ ID NO: 26776 - DNA, 822 bp, Arabidopsis thaliana
tgtcaagaggtagccttcctttttcttttttaccttttatcctggcgctttattacttgaaacgctgagtatttcatttgtttcttcccttctttttctttaatttatagttattcgaggaacttcagttattcattggagtaaaacacccactgcctgagggattttcatggtcattccttcgccgctttgagctccctagtgaggttgccgattgtgacatatctgagaagattgcatataatgccaaaatggctgttgcattttctgttatggatgagtgcttttcacctttggttgatcacaggagtggagtcaacctgcttcaaaacattgtttataattttgggtaagctcattcccaaaacctgtccttatatgcttctgttttgttcaattggtttattggcaagtgttttatggatatgtaaacagtccgtatgttactacttactagattatgtttaaactttttcctatttttttgtaggtcgaacttccatcggctagatttcagcagttttctcactgctgttttggagaggggtgatgaaatcattgctgtggcgtctattaggtatgcctttggtaccatgaaaatgagaacaaggggtaataagtttctagacttatcatactagacttaaaagcattacttagatgtgacattacactgttcgtatcatactagtggactagtggggcaaacaagattagaaaaccactttgtacccctttcattatactatttcttttgttaaggtacagagatcttaagtttgatagaacacactacatttagatgttagcagtttatgtcgt

SEQ ID NO: 26777 - DNA, 531 bp, Arabidopsis thaliana
tcgaacctttgaaagatgaccaattcaaacagatagcgggttaggatggagaaatatttggcgtcgagtacaagaagatagtgttgcttgccttcagttattacgaatgtctcttgattattttagatcattatgtgacataatggaaacaagttatggattacaacctacattgaatgttagtattgaagagagtgttgccatgtttttacggatatgtggacacaatgaagttcaaagagatgttgggttgcgatttggacgaacgcaagaaacattgaatcggaaaatttttgaagtccttagagtgacagagttacttggttgtgattatatcaagacgccaacaacacaagaactacgtcgaattcctgaaaaactacaaatggatcgaagatattggccatattttagtggatttgttggaattatagatggagttcatgtatgtgttaaggtgaagcctgaactacaaggaatgtattggaatcgacacgatagaacatcgtttaatatcatggccatatgtga

SEQ ID NO: 26778 - DNA, 612 bp, Arabidopsis thaliana columbia
gtgaaaacatgaaaagtttgcgtcaactcttgcgagtcattaaccatggccaacactttgtattcattcatgacatggtcgtatccaaagtaacagtgtttgtgtctctttggtgagagtaccattgattcgatcttgggtaaaggaagacattgcctcgtggtagggttgtatatggtaaccaaatcatatactgatgaagaacaacatataaagcctcgaacgtattgatacctgaacgcattatagtggtttcgtccaggcattattgatactttgggttttgtgctttgagagaatgtagacgacacggtgaagaaagttccaggatcacattggtggaagatgaagaccggaagcttatgaggcggctgtctcaaagaccgagccatgatcgactcaacgaagtctctacgtttgcttataatgaatgaccatggctttgagacacatcggaacctcatcaaagattttgtcgggagttttttgagtatcccacaattaggtcaaggggtagatgaacatcttttaattttgataaaagtagttgaaactctccaatcttttttctcctcttttaatgactctgcttgtcaaatactgatactttag

SEQ ID NO: 26779 - DNA, 360 bp, Arabidopsis thaliana columbia
tgaccccatgcctaaccaatgcacttctgagatggctaacaaagctgttccgcaactcttctcctctgaaatttacaaacacttgatgctgcggcggcaaaggaagtgcttttacctcggaagatgaagaggcctcctccatcggagtttgtttggaaacaaatcgttcttgagtttccttttgagatacaagacgacatgcttgcacaaacaaccttagagataccatttttcaaaatcttgacctgttctactcatctacagaacaaaaagaattgctacgaattagacagactataaaacttaactatcattctggttttatttaagttcaagttgaggtgttgtgacaaagagaat

SEQ ID NO: 26780 - DNA, 522 bp, Arabidopsis thaliana columbia
tatatacctcatatgtttaggattatgtcggaggaacatggatacactaggagtggcaagaagtgtagagagaagttcgagaatctctacaagtactataaaaaaacaaaagaaggcaaatccggtcggcgacaagatggtaaaaactatagattttaccggcagcttgaagcgatatacggcgaatccaaagactcggtttcttgctataacaacacgcagttcataatgaccaatgctcttcatagtaatttccgcgcttctaacattcataacatcgtccctcatcatcagaatcccttgatgaccaataccaatactcaaagtcaaagccttagcatttctaacaatttcaactcctcctccgatttggatctaacttcttcctctgaaggaaacgaaactactaaaagagaggggatgcattggaaggaaaagatcaaggaattcattggtgttcatatggagaggttgatagagaagcaagatttttggcttgagaagttgatgaagattgtggaa

SEQ ID NO: 26781 - DNA, 517 bp, Arabidopsis thaliana columbia
  unsure (1)..(517): unsure at all n locations
tttttatgttcagaatgtcgtaggctggattaatccggtttttctctgaattaaactcgatttgtccagtcagacctgtataattcatctcaagaatgacctgcaagaacctctccccttcattgaaaatgtgaagttttgatagcttaatgccgctatcgttggtattcctcagacttggatcattagagnaagtcactgtattgccttggctgaagaaaacatcgagagcgcgactaccaaccaaacagaatcgtaagcatacagcgcgtaagaattgaagccatcatcactttttagactctccttgaatctaaggtttttccatcttcctttaaactgtctcttgttgtcactctcaggtgtgtaatgacgaaatgcaaccactccttgcaagagatccaaagctctgggatccaacggttccatggaatccaaagctgtaagaagccaatcagtagtgatccagacatagccacttcccatcattccaagagatttggcgacagagaatatg

SEQ ID NO: 26782 - DNA, 502 bp, Arabidopsis thaliana columbia
gttagctttgttaaattgaaattgagcttcaaaatgggccttgtggaaaacaaaacaaaaatgcttccggcggggctcgaaccccgaccttcggctcataagaccaacgctctaaccaactgagctacgggagctgtttgatatacgtccgccgtttatgtaattatactagaattgaatacgaaacatataacgtcacagagtatttaaagtacatggctgttatgtcaacagagtaactcatatactaatggtatgttaagtacatggctgttatattagacctgaagacgacacatacatgagttagattatcctcatcaactatctgcaactaaatttatacattacaaaattcatcatctcttggagactaccactaacatcaacatagacattgatacaacaatcttgaaccctgaattgtcccagaacttctgtttatcccaagactcattgttaaggttttgcttctccgatataagatctcttatctctttga

SEQ ID NO: 26783 - DNA, 478 bp, Arabidopsis thaliana columbia
tgatttgaagcttatgtattcaaaaatcttatcttttgagcaagtgtcagtgttctatgtaagaatatagcagattaagtgttttaagttctcttctctcttactgttaaatgaatctctggttggatagttattggtgattcatagatggcattgaggatatgtgaattgatgtggtcatttgtcatgctatcaggagttttgctgatggattcccgaatctatatatcagcaacgcacatgatatccgaggccagcacgttgcgttccttgcttcactcagttcccctgctgacatctctgagcagatctctgtcatttacttgcgccctcgatagtctgttgcgatctgcacattgggggtgcctttcttgccactggctcctttgagagaatggaagatgaaggagatgtagcaactgcttttaccatggcaaggattgtcgctaatatcccatttcacgcggtggtccgacta

SEQ ID NO: 26784 - DNA, 563 bp, Arabidopsis thaliana columbia
tcagattttatttcatttttatttagagaaaaagaaccctaactcacttgggggttgactcagtcgttgaagatggcagtgaagagaatggcaacggatgcaagtccacagagaacagagaggaagtcgaaagcgaaagatgaaggacgattagctcgagcaaagccgtgtgcgacctgcaacacaacgtagcccacggaggcgaagcgaaacattggaaagaggcttgcttggagctttctcgaacttactcatctggccgtggaggaagaaggaaagcatgcctatcaccgcagtcctggggatttgctcgaagaatctcttgaatgcctcttggtttcttttgcattgctcctcctcttcgctcatgttcattctctccatcaactggggaaaacaaacaataagttaatcaaaaaaaacaaaacaaaaaggaagatatgtgatttgagagagaagaagagacaagataacggcggtgagggaagtctgcaatgaacctgaacgaatgagaaagcgagtgatgtaacaagaacaaaatctgccacgtaattgaaccagct

SEQ ID NO: 26785 - DNA, 508 bp, Arabidopsis thaliana columbia
tcacaaacagctgattcattgttaaagatacttaatgcctaggatgctttagtttccagtcatatataccctagtcttcttgactttgttcaacagcaaagaagaccaaggtgatgaagcgtcagtctacatttgttttccatcatgcctctcatccttggagtaacaatcgttttctccatttggatggtaactccccatgcttttaccttaagctgtaattttttaaaaatttcatatctctagttaagaacactgttatatttttctccagaagctatttttacggcatttgtccagcaataaaatatatgtttgcattgcagctttgtttcctgcggcaatttagaggctccatacgaaagtctgactacttcgcacttcggttaggttcctcactgtgagtaacttttttatttcgtttctcagtctttccttcaaatttaaaatataactttctagtaatttctcaagaattctcatctaatctggtagctgacatgattag

SEQ ID NO: 26786 - DNA, 611 bp, Arabidopsis thaliana columbia
cactcattaaaattagacgtcatcttatagtttcgatgtaacttgatttcatgtgtatataattttgctctcaattgaatctatgccgtttgctgcagaaacatagctaagcttgcaaaaattcagatttgtgatagaaatggccaatggaatgatcttcatattccccaaaggtaactgtataagtaaaaggttatgcaaggctttctatttgtacaatagagaatatagtaattaacataaatttttgttctggcagcataaggtccatagtatgtttgaatcttcctagtttttctggaggactaaatccttggggaacaccaaatcctaagaaacaacgtgatgtaggtttttataaacattctcttgctttattaataatcttactaaaacgtggttctctttttctttctattgtctcaacagagaagcctaactgcaccattcgttgacgatggactcatcgaaatcgttgggtttcgaaatgcttggcatggtcttattctgctctctccaaatggtcatgggacaagacttgcacaggtaaatgtaaagtgatagaagacaaactgtgagttaagtgcatatttttaactcgtgtggtgtgt

SEQ ID NO: 26787 - DNA, 558 bp, Arabidopsis thaliana columbia
ccgagttcgttttcctcataaagaatttgttgtaaagagagattatgatttgatttgcttatgatgtgtaggttctagaagatggagttcttgacccgaagactactattgtctcgatctttccgtcaccgatgcactatgctggtccaactgaagttcaatggcacgccaaggcaaggattaacgctggtgctaatttctacattgtaggtcgtgatcctgcaggaatgggccaccctactgagaagagagatctatatgatcctgatcatggaaagagagtcttaagcatggcccctggacttgagaaactcaatattcttccatttagggtaacacaaatcgattctgactgcaaaaccaaagtttcttgattatttgattatcggaatatgctgcttcaatgcccaatcatgtgttctttgtatctttcaggttgcagcttacgatacaatcgagaagaagatggcgtttttcgatccttctcgtgcaaaagaggttcttttcagttcccgtacaaaggtaagagacagttttgagacttaagattcttattga

SEQ ID NO: 26788 - DNA, 335 bp, Arabidopsis thaliana columbia
  unsure (1)..(335): unsure at all n locations
nnnnnnnnnnnnnnnnnnnnnnctaaaggctgcccgtcaaagcgggtgagcagcgtctgctgggcgagttaaccggcgcacgtgtgcaacgctggtagcggaaattgccgaacgtcacgccggtccggtggtactcattgcaccagatatgcaaaatgctctgcgtttgcatgatgaaatcagccagtttaccgatcaaatggtgatgaatctggcggactgggaaactcttccctacgacagtttttcgcctcatcaggacattatctcctcgcgcctttccaccctttaccagctaccgacgatgcagcgtggcgtactgattgttccggtga

SEQ ID NO: 26789 - DNA, 483 bp, Arabidopsis thaliana
tctaaacctagacgcggtcagcgttgaggacaaccgcattgagacattggggacaccgtttcatgccgaagacgggaacatagtgatagactctggaagcactgtcacgtactttcctgtgagctactgcaacctagtaagaaaggcagtggaacaggttgtgacagcggttcgagtacctgacccgagcggcaatgacatgctttgctacttttcagagaccatagatatctttccggtgatcacaatgcatttttctggcggtgcggatcttgtcctggataagtacaatatgtatatggaatcgaacagcggaggacttttttgtctggctattatatgtaatagtccaacacaagaagctatctttgggaacagagcacaaaacaattttttggtgggttatgattcttcttcactgctggtttctttcaagcccaccaattgttctgctttgtggaattgaagtacaaaccctagaga

SEQ ID NO: 26790 - DNA, 190 bp, Arabidopsis thaliana columbia
tgccagacgagaagttgacagggcacagtttggggaagctgcgggttgtactctggttctttgtcctcttgttgctgtttctcagtggttaaatgagattgctcggtttacatccccgggaagcactaaggtccttgtataccatggggcaaagagagcgaagaatattaaagagtttatgaactacgac

SEQ ID NO: 26791 - DNA, 853 bp, Arabidopsis thaliana
cttttctggtcaaggaactagtaagatcaattttggagcgaatgctattgtggcaggagatggggttgtatcaaccactatgtttatgacgacggcgaaaccaggtttctattacctaaacctagacgcggtcagcgttgggaacacccgcattgagacaatggggacaacgtttcatgccttagaagggaacatagttatagactctggaaccactctcacgtactttccagtgagctactgcaatctagtaagacaggcagtggaacacgttgtgacagcggttcgagcagctgacccgaccggcaatgacatgctttgctacaactcggacaccatagatatctttccggtgatcacaatgcatttttctggcggtgttgatcttgtcttggataagtacaatatgtatatggaatcgaataacggaggagttttttgtctggctattatatgtaatagtccaacacaagaagctatctttgggaacagagcacagaacaatttcttggtgggttatgattcttcttcacttctggtttctttcagtcccaccaattgttctgcattgtggaattgaagaaacaaaccctagagagtctcttttctatctttattattattttcaacttcagtttgtttggttaacttcagtttgttatttatctatgtcctatcaataaagttttaaatttttaatgaataatatgcgaagttgcttaggcgcttgagttgaaatttatatttctaggcatggattggtttcttaaagattcttattaatgttgtattggcaaatattagcaccttccactacacgtttgtaggaagtaacgttcgggaggacgttact

SEQ ID NO: 26792 - DNA, 860 bp, Arabidopsis thaliana columbia
tacagattccaaatgattgcaactacaagaacgatgcattgaacaattccaacagccctaaacatggcgaatctgaagattctgagatgactgacaaggatgtgagcaagcgcagtggtggtactgattcttctagtcgtgatggttctcctcttccgacctcagaagaaagtgatccaagacctaagcatcaggattggactgaaaagcagttgagtgatcatctcctattatatgagtttgaatcagagtatgatgctgccaatcacgtaagagcatattactgatcattttgatttatcagtgcgcaatattgaaagatgtttataaattcctcttttttttcttcttgctgcagactccggaaagttatacagaacaagctgcaaaaaatgtgagggacatcactgcttctgagcagcctagcaatgctgcaaggaagcggatatgtggtgattcatttatccaggaaagcagtccgaatcctaagactcaggatccgactttgctgcggttgatggagagctccggtcagatgatcccactgattatgttaaagcacagaaccatcaggtgcattctcgtcttacttcataagttgactattttagtttaccagttatgagtattcttaatcacacatttacatgttaatagatggtgtacttcagtttttgggtaatctatagttttgttctgtgcttgagatcaaacaacttaagatgtgtagtgatcttttgtgtccagcagttacccaaaagtcatacagaacaagattcaaaaaggaagcgtgacatcaccgcttctgatgcaatggaaaatcatctgaaggtccccaagagggagaataatctgatgca

SEQ ID NO: 26793 - DNA, 1130 bp, Arabidopsis thaliana
gagcaaaattccatctttatcacaaagaatgaaacagcagagtgagaattttctgtacaagtaataaaagctagagcatagttcacacagggagttaaaaattacagtaggtgcaatcttaatctttttctgatgtattaggtgaagaatcaagcacaccatagaaccttaccatcacgagtccagttgattctacatcttgaacaatgaataagatcaaaagcttggcttggatataacaaacgccttgtcgcaaatgctgccgccatagcaggcacaccacgctcaagagcaaattgaatttggttctcatggacatcttttggtgcaacagacattgtcatgacatcacgagacaatagataagcaccaaaactcgccacaccacaaccaacatccatagcaaccctaatatgcttgccaaacgtaatatcagaaaccatctgcagacacaaactccagagctcaacatcagatgaaaagatacataaacagttgacgcgaaaaacaagaactactacttggaaaaatgagccaccttagacatctggtccaagtactgatcagccccatgaataaactgtgtaccacctccaggaaacttgaacttgttcttgtctcgtgaaatccagttctgacctcctttgtcttcaacaagccgagtatgaggaacattgctaaaccatacctatccataagtaaattccaaatactacttaaactaaatcccaagacatgttatccaaccaaaatgcaaaactcatgcaaacaaaggagtacctcgtcacggcttttaggccatggaatcggctgacggtaacctttaggaggtggaactaagcaattcaagcctttacctttctcaggacaatgacgctcgaatctctcacctcgctctgtcgatttaagcttctttatcacatcagtattatccaaacaaggtatatactctctcatactctcaggacacatcccaaatttcttaattctaaccctagccttagaatcaccgtcgcttttcgcctcaacgatctcagtctgattcccccaatcttccactgtatcactctcaacctcacccacctcaaaatcgtcagacatcacaccgttcgcatcaactatcccaaagc

SEQ ID NO: 26794 - DNA, 1021 bp, Arabidopsis thaliana
tgctttcttctatcaatattttcaatggaaacaaataaaagcttgatcttcactacctggtgatgaggagccacaaagatatggtaaactctctttgaagctcttaagctggtttcctaaactaatattgctttgagaacaatgagttcctttctcctcaagaacagaacattctagtgctgttgctcctcccaccgcaaaattaactcctttctcaaagtttccatttttagatccataaaacggaggcacatgtggaatccctaagaattcagctgtgaacaaaagaaaccaagaaataaaatgctttcgtatttttcaggttttaatacatattaaaacaaaaaattattacagtataaaaatcaaaaactggaatccaattaaattgaaaaaaattgcactaaaacaaagattatgatcttgctttacagagactctctcaaagtttaatcaaaacatagccaattcaaaacgttaaaacgtttaaaataccaatgaagtcgatgatgaggcggccatcggagaaacgaccagacggatggtggaagaaggtttctccgtatggcggaaaggctgactcaggaagatcgttaggactagagaggccgagtaagtttccagtatcagtaatcgagtcgccgaaactgatgatcgacttgaaatttcggcatcgagtttgcgaggtcacgacagtgattaaaaaagtagatataaagaagctcaataacatatgacaatcttgagacgccatgcgagagctttaagctgactttatatctttctttcttttctttgtgttatgatatattattttcaaaatcttttgttttggaacccaaagttgagccacatgttttagcacttcgtcgaaaacaaagaaaaccatcaagtcgtgtgacaattggcagagatgggccaatgagtcatatgagttaatgagccttaagtaaaggtggggcaaaggaaatttactttgtatgggacaataaaactttgtatttgtattttatttgtctac

SEQ ID NO: 26795 - DNA, 527 bp, Arabidopsis thaliana columbia
  unsure (1)..(527): unsure at all n locations
tcgtatgtatttgtctcgttctttataaaacaagaaaacaactgaacaaaatcctctaaccagtgtaagactacaaacactgttaagctatacagatcaagagataatccaactggtccaattccaatacatgcagagtacgttgaaatcaattcgaacgtccccaaggtacggatgtattagtataatgggatggtgcaattagataaatattcaggcatttagagggtaacgagaaagaatgactatagaaaacttcttacatgatcaaatgttctctgatcccaagcatttgaccacacagctgctgcagcccagtagccagcaactgcatcggtttcatcaggtgcatgctcagatgcactctcattgattttagtccaagaacctagaacaacaccatcaacctcaccacactcaatcttgagatgctgaaacaaagacgaccccccaanggtgcaagctaatttcactggagtcaaaaggtagtgcagctttaaggagttcctttcgacgagcaagatatg

SEQ ID NO: 26796 - DNA, 1148 bp, Arabidopsis thaliana
ttattttaattactataaaaataaatacaaaaaactaagatagatatacgatctttattttttctttttgcatatattagctattcgttggcggcaaaattctaattaatatgtatataattaattacaataaataataaatgtttgaacaaaaaagaaaaaaaaaagaaagaaagaaaggccaggaatgaagtatctttccatctcaactatagctatataaacccctcaatacttcaagcaaaagtcactaacaagaacaaacaaacacacacaactcataactataactatacattcatacatataacaataattcacttaaatcactcggaataatgcaaatctcatcttcatcgtcttcaaatttcttctcttctctttatgctgatgaaccggcactaatcacattaacaattgttgtagtagtagtagtgttactatttaaatggtggttgcactggaaagagcaaagactacggctacctcctggctccatggggttgccttacatcggagagacactccgcctctacacagaaaatcccaattccttcttcgccactcgccaaaacaagtactattttcttctcctatgttgttacatacataaaatatgcatgaattattgatatattcacttaaggtttattgttcattgtatttttttaaccaatatattggatggtaaaaattaaacttatatattcgagcgaactatggaccgcaaagcaatacttttgttgttacaaaaaacgtatttttgaaaaaaatataaccaattcatggtagtctagtagttaaacggttcacattatcaatccaactaaagttagtccttacactatgattttaatcataacaatcactttttaaatgttttacacgatcaaaatttgcttttacacaaattccgaaaaatagtcttaagtgtgaaatatccgatccgcaggtacggggatatattcaagacgcacatattaggatgtccatgtgtgatgataagtagtccagaggcggctcgaatggtgttagtgagcaaagctccttgttcaagccaacttatcctccaagcaaagagcgtatgattggaccagaggctcttttcttccaccaaggtccataccattctacccttaagcggctgg

SEQ ID NO: 26797 - DNA, 338 bp, Arabidopsis thaliana columbia
gaaataaaccggttaaatcccaatttaaaccggatcaatcaagatatggtaatccccttctccttctccaaaaatcacaactctgttccaagtcttatcctttcatcatcatcatcacttaccttcttcacagagagagagcttcatcatcatatgtaatgtgagatgtctcttgaacaatgcaacaagaagctctctctttcctctcgtcctctctcccttcccttcaccacaattttccctctctttctcgcctccgcttcaacaattttcccgcactttccttcaaaccaaacacttcatcatcatcttcatcattcttcaaatccccagatata

SEQ ID NO: 26798 - DNA, 481 bp, Arabidopsis thaliana columbia
ttctatggcatccagactgtaacactaataatatctacattacaagtgatcaagatctgatcatctcgtactgcaaagcagataccgaagatcagtggatagaaggaaatggtaagaaaaataacccctcaagataatattaaccagatattataacctaacaaatctcattgatggatattgattattggtgtttagtgggaagatccagcgggatcaatcaatatcagcaatatattgactgggaaatgcttagctaaaataacaccaagcagtgggcctccaaaagatgatgagagcagcagcagtaattgtatgggaaagaactcaaagcaaagaagaaacgctgtagctgaagctttggaagacataaccgatcttttctacgacgaagaacgcaatgagatatacacaggaaacagacacggccttgttcaagtgtggtccaattgaattcacatacatcgtcatcgttagctgc

SEQ ID NO: 26799 - DNA, 532 bp, Arabidopsis thaliana columbia
  unsure (1)..(532): unsure at all n locations
nnnnnnnnnnnnnnnnnnnnnnnctaaagggaagcattggctttcgcctggcttgcctggcggacgctggcgggattaccaggaaatctgccttccgtcactggcgcaacatggagacggtactgggggctattttccccgctaacccgtgatatcagagttaactgaatttttcttaccgcgtctgccgttacacttggaacgttagggagggcgtattgcctccagaccaggaaagtcttcgggatatgactatgaaaaaactgttaattatcattttgccggtccttctctccggctgtagcgcctttaatcagctggttgagcgcatgcaaaccgatacgctggaataccagtgtgatgaaaaacagttgacggtcaaactgaataatccgcgccaggaggtcagttttgtttacgataatcaactactgcatctcaaacagggcatttcagcctctggcgcgcgttacactgacggaatctatgttttctggtcgaaaggcgatgaagcgactgtctataaacgcga

SEQ ID NO: 26800 - DNA, 399 bp, Arabidopsis thaliana columbia
caattgcccaatatgtttcaggtcgatcgtttaatgaagcgccaaggactttcagagacaaaggtagacctttagactccccaacaacctaacaaatagagtcaagatgagtactgaaagtacgaagaatattactactatgcatgtaacacttgtagcagacccattacctgcttgaccaaacttttgctgatccctggaggaactgatttctggttgaaagcagagagacagaacagagatgttgcgtcatgttcatttaataactctacatcatgaggtggttctaggatctacgagtttagactgtgagaccacaagcgttgtggttccagggatattgaacatcagctggtctagagattcccctgtcctagcatcatcatggatcactagctt

SEQ ID NO: 26801 - DNA, 682 bp, Arabidopsis thaliana
tagaggatagaggatcccccatacattagcacatgtacaagcgtcacaatcacaaaccttgaagatcaacagtaataacctgagacgaatcttccttatcaacaccaaacgtcttcagaaccttactagatgaagtagtaatcacttcaacggcataatttccactataccctctaaacggaaacgcaccgttttgatcaatatgtccattagcatgagagagccaatcttttttcacagccaaaaaccttttaccagcttcattaacatctccttctgcattcaccaaatgagagttgtctctgctcataaacaactcccaaaatccccataacattataccttccaccgcgggatgtccaaaagcttcccacatcattacttccaaatcatctgcccttatgtgctcattgaccgaggagacatccaattctgtgaaccatattggtaaaccgagaattcctagtttgtctagggctgaacatacaattggacccaccggactgtcgatatggccttgaatcccgattcctcctaccggcgcacccttttctatgcaagtcaagaatctgttccgtgtacttttcggggcaggattttgggtcaacccgtcttctatgtggtagtcgttcaaaacaatgtcgcagatgggtctagttggtgcgcggttttgaacatgttg

SEQ ID NO: 26802 - DNA, 540 bp, Arabidopsis thaliana
tgatacattttctgctgatgacataatgggagaagcagatattgatatacaacctttgataacatctgcaatggcttttggggatccagaaatgtttggggatatgcagattgggaaatggctaaaatcgcatgataacccattaatagatgacagtatcattaacattgttgatgggaaagtgaaacaggaggttcagatcaagcttcagaatgtagagtctggagaattagagctagaaatggaatggctgccacttgaccaataagtgtcatataggtctcataacctttataaatgtactgattgatttaattctttgttttttttttttctctccatttgttggaaattttcaaaaatctctttgcatttttttcctcatttcagaggtaaatgtattttgatgtttgtataaaccaatggattactatatgatgttttgattgatggaaaaagggtgaaatatccacttatgtaacatacactttcacttgtgatcatcaatttacttgagagtcgttcttcaaagttcaaact

SEQ ID NO: 26803 - DNA, 521 bp, Arabidopsis thaliana columbia
aaagctttatatttcaatattttgcaacaccttttaactgaaacaagcaaacaaacacaccattggttgattgattgttgcagctatggggatttgtgtatggctcaaagtatgatgagattctagctcacagcaaaacaatggagcctggtctttgcagatggtcatgatcattataaagaaaacccaaatgaattcaactgagattcgtctttttgttgttgttgttgttgttgttgtataaatctgtagtaaaagaaatcttgttgtcttgtaacttggctaaaatcacatatatgttactctctctcacttgtaatgatgattttgaaataacaaaataaaaccacctattaggctcattcggcccattaaggcccattaaagcatatgtgtgtgtgaagagggattaattttagtggggaagaatcaaagaagaaaaacccttgctactgcttttcatttctgacctaaaagctcagctccgatttgaaaatggggagtagattgggaggacgagt

SEQ ID NO: 26804 - DNA, 555 bp, Arabidopsis thaliana
  unsure (1)..(555): unsure at all n locations
taacggccgccagtgtgctctaaaggacagaatttgccctgttgctacaaaactggaccttaagcgtgattttcagcgccggactggtggcgttcaacaatgatttcgacacgcaactgaaaatctggctggcgtggtatgcgctgaccagcatcggactggtggtttgccgttcgtgtattcgcattggggcgggctggctgcgtaatcatggctataacaagcgcatngtgtcgcggtggcgtggggatttagccgccgggcaaatgctgatggagagcttccgtaaccagccgtggttagggtttgaagtggtgggcgtttaccacgacccgaaaccgggcggcgtttctaacgactgggcgggtaacctgcaacagctggtcgaggacgcgaaaggggcaagattcataacgtctatatcgcgatgcaaatgtgcgacggcgcgcgagtgaaaaaactggtccatcaactggcggacacacctgttcggtgctgctgatcccgacgtctttacctcaacattctcattccgcctcgaagagatgaacggcg

SEQ ID NO: 26805 - DNA, 581 bp, Arabidopsis thaliana
gtaacagccgccagtatgtattctagaagcattatcatagaaacacacaaggcatatggacaaacgaagcattattctaaagatcttttagtttcgtacacaaaaacaaaaaaaagagaatcatcaacggatataataatttacacatcgactaataataaatctttcaaagccatctcttaacggcttaagtacacaaaatgttaaacgcctcagtgcacagtttctttctaagcttcttgttggattgcacgtctgagcctaagtccattatcaacatctccctctcgtcctatcaagacaccatctcctgcatcctcactactttggttttggttttgattagctaaagcagcttccccaaagttatgcagtctccgaccaatgagataacggtcatcacggatagagttgtgaaggtttctaaaccagacatggcatctttttgcacagaagcagaagaggctcactgaaagacaacctatccacgcgaatctgtagaccgctgagttccaacaagcggatatcgagcattgggacactcctcttgccacacataaggcagcataaagccgttagag

SEQ ID NO: 26806 - DNA, 470 bp, Arabidopsis thaliana
tgatagttgatgacccatcaagtgtctccgtgaacgatgcatatatcggtgatcgtgaaacactgtccaaccttcgtagttcccttgaagtagacctgtagaagacctgaagcaattttcagttagtagaaaatttgaactcttcttcttctctaagggacaccaaatatgaaatcagattggctacaagaagttgtatatgtacctgaagcttgctgtatatgtaccaaaatggcagaagcagaagcaggaatagaacctgtatacatattatacattaatgtaacttctccaacaaaacagaagagttaatacttagcaaaaagagagaagagtttcagacaaacctgaacataagacaatactacaataatccctaacaagccaacaaaatttgctagaagaatgttgagaataaacgggagagagtcgtcgatggtatatagatcagaggaaacctgaccagagta

SEQ ID NO: 26807 - DNA, 602 bp, Arabidopsis thaliana columbia
ctcctttagcaaaggcctgacatccacagaatccaagtcttttctcgaccagtcacagaagaattcttcgtgaacatccatgaggaatctcaaagcagtgttcaatggtcctttctcatcactctcatctatcttcttcttacattctgacaacaaacaagactgatctccaaaatacttgtacctagcaatctgtagcaagtttttcttgtcatgaggccaaacactactcttatcatcaacaaccacaattccacgctcatcagccaacacaagatcaagcgtcttaaaaccaggactctctcttctcgttataacccgattgccaaagtaaatcttatccggatcaatcatctccaacacgagctgagcatagtcataaccaccctttgtgtaaacatacaaagagaacatctcgttacattctttcagaaactggtgaacaaaagatctcagctttatcaaagattcttcaggaaacccagtgttgaatctccgtagatctttcctcgattccacttcttctgttatatacttttcagattcagaaagctgtgaactttaatggtgtgacaagcgtgtggtcaagtcaagtactagtg

SEQ ID NO: 26808 - DNA, 492 bp, Arabidopsis thaliana
gaacgtttttgtcgatgttgtttccaatggccaatggtgtgatagggttctcctcaccgtgtcggcgattattcctttctctccatatggtgtgtaccgttatttgaaatgtatatctcagcagtagaagatgtgaggagcgtaacaatgcggtcccaagaagaagtgtaatgaccttgaagtaggcctttcatgagcttctcccacacttgtgttgaataagggcactgaaagaagaggtgatttcttgtctctaccggttcagcacagaatttgcaggtagtatccacttgtgtgttccatgatctcattcttgcacccgagtgttagtctatcatgaattgcaagccaagtgatgaaagagaacttcggtgtagcctccgagaaccaaatccctttcgcccatctgcagattggggtttcaactctcagcattttccaagtttcatttgaggagaagttgtgtttaaaacctgtcttccatttccatag

SEQ ID NO: 26809 - DNA, 589 bp, Arabidopsis thaliana columbia
ctgcttacacgatcaaggcggtggatgatcctaggactctgaacaaaatcctatacattaagccttctaacaacactttatcgatgaacgaaatagtcaccttgtgggagaaaaagattggcaagtctcttgagaagactcacctcccagaggaacaactacttaaaagcatccaaggtttagataatcaattcacaaagaggtttttagattctttattaattactcattctgaattaaatgattatcttttggcagagtctccgattcccatcaatgttgttctgtcgataaaccacgcggtgtttgtgaatggagataccaatatcagtatagagccttcctttggtgtggaagcctctgagctttaccctgatgtcaagtacacaagtgttgacgagtatctcagttatttcgcttgatgaacttcattataaacgtaatttaccaccatgacgcgctagtttcatgttctgtatcaataaaagaatggttcttgtaatggtgaatgtgtgtgtgtatgtgtgactaatcagtaatcacagtgctttacctctgtttccgagcttcctaagaaatatgaattagt

SEQ ID NO: 26810 - DNA, 446 bp, Arabidopsis thaliana columbia
ctcttatgtgacacacctttaattcaaaagacttactgaaccaggaaactatagcaactttcagaatctataactttgagaaatcgctatggaattgtttatggttcttttgttgtggggatctgtattggctcgcttgacatattttgggcttgacaaggtatcagaaaaaataatcttgttcattccatgtctcagggggagatgtgaatcatcctctgccactagctcgaaagcatgtagagagaagcagcgacgggacaggttgaatgacaagtaagttttaacaattttgtatatccttcctttactctttagtaggtactaaaatgatcgccttttaaatcaataacaggtttatggaatcgggtgcaattttggagcctggaaatcctcccataacagacaaggctgctatcttggatgatgctgtccgcatggtgaca

SEQ ID NO: 26811 - DNA, 541 bp, Arabidopsis thaliana columbia
caatctcaaactgctcgagtcttgtccagttacagctcgataagaatcagatttcaggtctaataccgtccgagcttggaacactcacaaagcttactctgttctttgcttggtctaatcagctagaaggaagtatccctcctggtttagcagattgtactgatcttcaagcattggatttgtcgcgcaattcgctaaccggaacaatcccttccggtttgtttatgctaaggaacctcacaaagcttctcttgatctcaaactctctgtctggttttatacctcaagagattggtaattgcagctctttggtgagattgaggttaggtttcaacaggatcacaggagagattccttcgggtattggttctcttaagaagataaactttctcgatgtctcgagtaataggctacatggaaaggttcctgatgagattggaagctgttcagagttacagatgaatgatctcagtaataactcgcttgaaggttctttgcctaatccggtttcttcactctccaggtttacaagtacttgatg

SEQ ID NO: 26812 - DNA, 670 bp, Arabidopsis thaliana
tgccactttttatttcaacctgatagaaatcctttgccaagtctctaagctttaagagtttcctccacatccaagaaccttgagatgaatttcccttgactgtccaaaacgttttttccgaattaaataggcatgaatccacttactccacagagacgttggtgctgcaaataaacgccaaattagcttcagaccacaaactttgtttgtctctttgagaggtcgaagacctagtcctccttctctaatcggcaaacaaactacatcccacgatatcttagctttagaaggatttaaatcaggcccactccagagaaaagcagaacaaagttgttgaatctctttaatacaagcgtcgggtaagctgaatgttgaagaccaaaagtttgtgatgctcatcaagaccgctcttatcaactgcaatctccctgcataagatagaaatctacacgtccaagagcttattctggttctgattttctctactagaggaagataatcatgagctgacatagctttagtcatcaaaggtaaccccaaataccgtactggcagcttacctgttgcaaatggaaaactcgattgaatggcagcttgagtagtagggtcaatccctgccatgtagagagtagatttctcaatactaattctcaaacccgagcattttgca

SEQ ID NO: 26813 - DNA, 829 bp, Arabidopsis thaliana
caggtgatctctaaagattgttcttcttggcaatttgaaagttgtagcaaagacgaaagtaataaagtaacggtcatattaaattcatgaaatacgataatttaaatagagattttacgaaagtagttaatgcaaatgtaaatcattcaacaaggcgatcaagaatcccggagacaacaccacaaatacgtctcagactagcttcacgccggcgaatctccaccggataagccaaccctttaacccgcctaaaaatattccggcaaacattaggataatcctgcgccgccaacacatgcatggaggcatagtcataagcttcatcatcaagatcttgaatcgtcagccggagagaatcagcggcgagagcatacttctcggagcaatcttgtaagacctttttgagaacggtgtcttttacggtggcggataggtttccagcgatgtaatttgcggtggaggtggcgtttgtcataccaacgccgaccataatggaggcgagaccttttgtgtcggctgtgggacttcttgggtcggatttgagagctgagacgcagaatttgtagtagtttgtggttttgcaagttgattcgattattgttgttgtgttggatttggctgagattagggttgatgctgaaaaggttagggtaacgaggaggaggaagatgagagaagaagccatttcaggaagaaggttttgagcaactgtttacggagagatagagatggaagaaagaggattcttgtctttatattctgagcagtttcttgaattacatattttacaaaataaatacaaatgataacgtttccgtttatcatttgt

SEQ ID NO: 26814 - DNA, 1040 bp, Arabidopsis thaliana
ttccttgtttctgaagaagggtgattcgtttgcgaacgtttttgtcgatgttgtttccaatggccaatggtgtgatagggttctcctcaccatgtcggcgattattcctttctctccatatggtgtgtacctttatttgaaatgtatatctcagcagtagaagatgtttcctcccaagagacgaacttgtgaggagcgtaacaatgcggtcccaagaagaagtgtaatgaccttgaagtaggcctttcatgagcttctcccacacttgtgttgaataagggcactgaaagaagaggtgatttcttgtctctaccggttcagcacagaatttgcaggtagtatccacttgtgtgttccatgatctcattcttgcacccgttgttagtctatcatgaattgcaagccaagtgatgaaaaagaacttcggtgtagcttccgagaaccaaatctctttcgcccatctgcagattggtttttcactctcagcattttccaagtttcatttgaggagaagttgtgtttaaacctgtcttccatttccatagaatcaaatcttcctcttcaaccttcctcctcacccttgtttccctgatgacctcttccactctatttaaagtctccactctatgtcgtctacctctctgagagctcaaaacgtcacccactgtggcttcttttgtaatacccaaatcaatgcaccctcgatctccaaaagtatcaaataagttccccaaagaggaccatgtatcataccaaaaggatgtccctctgccactttttatttcaacctgatagaaatcctttgccaagtctctaagctttaagagtttcctccacatccaagaaccttgagatgaatttcccttgactgtccaaaacgttttttccgaattaaataggcatgaatccacttactccacagagacgttggtgctgcaaataaacgccaaattagcttcagaaggatttaaatcaggcccactccagagaaaagcagaacaaagttgttgaatctctttaatacaagcgccggataagct

SEQ ID NO: 26815 - DNA, 562 bp, Arabidopsis thaliana columbia
gaagatctttggccatagattctaagattttaaagaaattcttcatcgcagattattctacaaactcgtgctcgattgagaacaaacctagctttgataaagcagttatctacgtttatagttaccctgatgacaaatttatgagatctctttcctcagtcagatatctcgagatacgtctaagcgttgcaacggtacttttcacctcacttttatttatactttatttatttattgttatgatttacatttccaacagttacttacgtgttgttgtgttcattgcatattccgtgttgccacgccattaacttctcacagcttatagagtgcaaaatatgtctctttgatgtaaattggtttgagccattagtgtcttttgcttcaaaattctcctgaactgaaagttcttctcatcgaccaggtccgtgtttgtgcatgcattaataaaagtaaaaacttcaaaattagcaaacatgttaattactttccttgatgttgttgctcgcaattatggtataggagtgaagctttttcgcgttcgtggaagaaccgaatgata

SEQ ID NO: 26816 - DNA, 611 bp, Arabidopsis thaliana columbia
tgtgtcgatcctcgtctttgggcttctcagttatcatcgaatttgaaattcttcgccgtggagttaccgtcgacggagcttgcggaggttattgtttcgtacatttgttgggataataacgttcctattgtttggaagtttcttgaaagagctatggctttgaagcttgtttctcctctcgttgttcttgctcttctcgctgacaggtctggattcatcgctcatggattgtttccttagggttctatgtgttgatgatttatttcgtaatttggattgtgagttggtgaattatagtttggaaaatctctacgattttgtgatggatcttagatttggttttatcttattgtagttctatgttttctgattgttgcagagttgttccaacccggtctacgcaacaagcagcttatagaatttacttggagctgctcaagagaaatatgttcaccattaaagatcatattagtggacctcactaccagaagtgagtttttttttgttgatacttcttacttactgtttcattcaaatgcttggctctgtaggaaaaatgttagtaaatgtatgtttccattaacattgtactcagaagtagaatttagaga

SEQ ID NO: 26817 - DNA, 502 bp, Arabidopsis thaliana columbia
tttgtgagagagtgaggatttgtaaagatttgagagaagaaatgcgaggagggatttgacctgagagagaagggtttgatctgaggctaagttgttgaagagaagagttagggatgagttttatagggaacatgattgtggttgggaagtgagtgaagcagttgaagaagaagactgattggagaaaagggagagtgaagattgaagaagggaaagaagcagaggatttacaagaggggtttggagcagagccgaaatcgagtcgagagacgtgtgataagtggtctggaccggttttgcactcaatgcctggccaagatgagccaggtgcacaagggtttgggtgggattgacgccattgttgatcagaagacattgattccatgatcttgaagagagtttctgactcagatggaggcattgaggcagagactctgtgttcttggcagaggaagagtggtgttacaggagaaagaagagagcagtgaggaaggagatggta

SEQ ID NO: 26818 - DNA, 578 bp, Arabidopsis thaliana
tgtatgtagcttttaatatttcgtctgacttttgtataattttaaatacattttataagattaacaagccataacctgtcagaaatttaataaaaaaaaaataaaggaatgcaaaagtattttatcgagtaaagaagagtatttttgtaagtattatcacaacaaacgaaatatatgtctactttcattatttgattattgaactctgatgaactcatcatcaactacattgatcaagaaattgaaaaacacacactaaagaagaaaacgaaaagaaaagaaagaaagcagctgctttcattattggattatcgaacgtagacgaagtaccatcacccatattgataacgaaactgaaaaaaaaacacactaaagaagaaagaaaagaaagaaagctgcttagtgtttgcttcacccgctcattcaaaaccccattgattctccctacgaaccgcttcttcttcctcatgtgtataatcattctcaatgttgaagaatttgcgagtgtgcccacagtgttgtctttgatcatatcgcgacggtttggcatgctagatcaagaaggcttttgatgttta

SEQ ID NO: 26819 - DNA, 494 bp, Arabidopsis thaliana columbia
acaaactacccaaagcattagtggattgagacccatcgagagatcagttgcagcttttccagggcagaaccgcagaagatgcccaaataatgctataatcacccatagaaaccataccaaagctacagagtctcacactcacagttctcgttccctacaaactacccaaccattattggattgagacccattgagagatcagttgccgcttttccagggcagaaccgcagaagacgctcaactaatgctatgatcactcatagaaggctaaaaatagttgaaaactagaagacttgcaaagggagagagaattggccatggaacattacatcttgcataaattttttgcagactgggcgtatctctttgctgagcgttgctgagaacatcattacttgtttgtcatgaggagtcatgttgaaaatctcctgcacatcccttcgcatgtctggtaagaaaatagttaaagtgttataacataaaattattcaggg

SEQ ID NO: 26820 - DNA, 485 bp, Arabidopsis thaliana columbia
  unsure (1)..(485): unsure at all n locations
nnnnnnnnnnnnnnnnnnnnnnttaaagtgataatcacgttttacgctcgcggcaattccggcagcatccagatcttcacactttgggaaagtgaccgacttgctggtttcattattggcagcgaaaactgatgcgcaggccgaaaccaacaacagccctaaccccgcccctctctcccccatgtttttctccatagcacaatgattcaggagaaagcatggtacaaattgtcaggagcgcaagttgcttcaggccgcgtgtgaggcatcttcctcttcggattcagcaccgacgacctgtggggacggtaatttgccggttttcagaatggtgctcagcacatctttctgttctgccagccatagcgaaagggcttcacgttgctcgtcttccatttgcactggagaatttgtcagacaggtgtcaagcagatccgccgtatcaagcattttgtcataaggatcggcttcctttttgctggtaa

SEQ ID NO: 26821 - DNA, 553 bp, Arabidopsis thaliana columbia
tggattctaatatgattgttatactgaatgatagccgtcactctttacatccaaatatggaggagggatccaaggcatccatcagcgcactttctagcatcatgagcaaaatccaatctagcaaagttttccggaaatttagagaattagccaaagtatgcattttccatactctctttttgaaactttgtagttgcttacaattatgaggctggaaatttggtgtttaacaattaatgttgactaaatattttgaagctccaaatttggtgtttaacaatttggtgtggattttgacaggctatgacgaaaagaattggaaagggaatgtatgaatgggcagccaaagtcgatgagtatgctcgcggtatggttggaccaacaggatcaactctctttgaagaacttggtttgtactacattggtcctgttgatggacacaacattgaagatctagtttgtgttcccgagaagtatcttctctagattcaatgggtcctgtgttggtcccgtgatcacagagggaaaccgagatgcagaaaccgtaaagaac

SEQ ID NO: 26822 - DNA, 586 bp, Arabidopsis thaliana columbia
atcaaacccatcactgcattctatggaagcagagaatgaggcttatacccgttgggattttgtggcaggcctggaagagaaatacttaaagcaaaaatcgaagcaacattggatgcaagtgggagataagaacaacaaaacttttcatcgggctgtggtggctagagagtcaacgaatcagatcaaggaaatccattgtgtagatggtagtgttgcaaaaggagataagataaaagtggaagctgagagattcttttgagaatttctgcagcttatcccagatgattatacaggtgtcgaagtcagtgagcttcaaaacctgctgcctttcgttgttctgatacctatcaaaagctgcttacacgtgaggtgttagcggaggaggtgcagagggttctgttttctatgccaaaggacaaatctccaggtcccgacggttataccactgagttttataaggcagcatgggctaccataggtcatgaattcactttggcagtccaatctttttttgtgaaaggtttctccctaaaggaataactcaactattttagctctaatccgaagaactgagagcaaggaatga

SEQ ID NO: 26823 - DNA, 490 bp, Arabidopsis thaliana columbia
tattggacctattgaaataaaatatattaaaataataatattttgtgtaatagcccccaaattcaaatatctaatccgttctatatatttcccaaacttagtgccacttagacacaataagaaaaccgttaacaagaagaaaaaaaaaagatcgaaaatggaatatcaaactaacttcttaagtggagagttttccccggagaactcttcttcaagctcatggagctcacaagaatcattcttgtgggaagagagtttcttacatcaatcatttgaccaatccttccttttatctagccctactgataactactgtgatgacttctttgcatttgaatcatcaatcataaaagaagaaggaaaagaagccaccgtggcggccgaggaggaggagaagtcatacagaggagtgaggaaacggccgtgggggaaattcgcggccgagataagagactcaacgaggaaagggataagagtgtggcttgggaca

SEQ ID NO: 26824 - DNA, 497 bp, Arabidopsis thaliana columbia
aatccctataaagagccgagatgttacacggcttatatggtaacgagacattaaaggaagcttctcatgtaacaaagcgagctccttttggtttgcccatgtgactgagaattcctctgcagcttgtctttccgctaacacatcaaggagccacgtgaggttatctgcttctacagcaatctgtttggtatcagtctcaggtttctctccctcagaagcttgtttaaacagagacagaaccgaatccaagcaggtttggcaagaggaatagattgtatcattgaagttatcagctacattggctccattctgttctctaagaagcttcagaacaatagatttcatctcacgtcgacttttctcctctttgcttcttaaaacaagctcaatgatgcgtgatagcgtctcctatggtggatccacagcattagaagcaactcgtttgagaacaggcgtgacaccaactccttcagtttttaatctaagaatcgatgaga

SEQ ID NO: 26825 - DNA, 627 bp, Arabidopsis thaliana columbia
taattagaataagaggtgagcaaaatccaatatacaagccaaccgcatgtagggaaaacaacaacacaaaattggtctcaagagaaaagaatagtgtaatacatacccaacgtagagagttcccacgatggccattaatatgacaagaagaaccagcaacgccaactgtgcacctgtaccaactaccgctgagagcagaactagactacttgctggcctgaacacatctccatgcacaagtttccaaccagattcttcacttacatcccgttcctgtgcccatcaatactcacgtcagaaatggctatgaagccttgcatttagaagtaaagaaagaagtgttggacagactgctagagagtattaacagctaaaaaaacaattgtgcaactaatgacaaataaaagttgaggaaacatcaccaagctctcaagatcatcatcttctctagcatacttcgcataatcatttctgagagtcctcatcaatatcattgagaccaaaccggtgaggaaaataaccatcatgaacgagttaaagatggagaaccagtggatctgcaaaaagaacaaactctcagaaggcttataaagcttgaacagaaatcttgaagagatggaatataga

SEQ ID NO: 26826 - DNA, 595 bp, Arabidopsis thaliana columbia
  unsure (1)..(595): unsure at all n locations
gaagctgatgttttcattggggatataacagatgctgatagcattaaccctgcgtttcaaggaatcgatgcgcttgtgattctcactagtgctgtgcctaaaatgaaacctggttttgatcccactaaaggtggaagacctgagttcattttcgaagatggacagtatcctgaacaagtaattaccatgaacatctatacattttcctttgagtttcagcttaagtatttgttcattctagtgtaacatgaattggttttgtgtaggttgattggattggacagaagaatcaaattgatgcaggtatgtgtactttcttccatttgtcttttgtttaaggttaaattgcctaatttggttgagcttctatgaacagccaaggttgctggtgttaagcatattgtcgtggtcgggtcaatgggtggtacaatccggatcatcctttgaacaaactgggaaatgggaatatactggttggtggaaatttctgtgtgtttgtctttccaaatgagtttagttcttacactgcgatcaatatttggctacctaatatgtgntcaggtttggaagagaaaggctgaacagtaccttgctg

SEQ ID NO: 26827 - DNA, 413 bp, Arabidopsis thaliana columbia
ctccaggttcttttattgatccggcaaatggagcacagtaacacacaatccgtaagattctcattgtttgtttatctgatctttctaagagaagagactggatgctaacttttggatgactcttcttgtatacaagggtgccgcaaaggtctctatagtaatgatcgggcaacaagccatcatggattcttatttatgccttttacatctcacagctgggattttagttggtatgtatttaaatataacccgctattcttcacaatgtgccctctttgttttgataattatcttcatagcttttcatactctgtctaagaacatttctcaatgattgtgatggaaattctcataactgtctatatctttacatgtcatgcttttctcaatcattctattttattctcatgcag

SEQ ID NO: 26828 - DNA, 1767 bp, Arabidopsis thaliana
agacttattttgaagaaatctgtcaacgtcgaatgaaaaacatggtcagcaacgcgaggactagtggagagaaaccaagctggattgcaccccttctctgggacagaatgttagctcactgggacactcaagaagaaaagcaaaggagtcggacttattcaaatgtccgtatgtctgaccgtaacggtctcggtccgcacatccacttctcaggccctaaatcgtttcaacagatccaagatgaaatggttagtcactttgtacattcgttcttagtagtttttacactgccgccacattttattctaacttctctaattgtttggttacattacaagaagaggaagtgggtcatcctgtttgtcttggtgatgttttcatcaagacacacacaaaggctgatggttcttttgttgataaaaaggcggagatggttgcaaagaaataccaggagaatgtgctactgaagctgtctgagcttgaggcagaatcttctgctgtttcagatggcacatcaagaacacgggagctcacacccgaagaatatacaaccatcttccttgaggttatgtttcatttctcccaatacttctgctgggttgaatcttttttttattttaatctcatctctggttctctattgctttgcagtccaccatgaaagattcaagaggaaatccgtatggagttggaagcctcaaggacttgctggtcaaaggaaagcagaagctagaagactcttcttgttttgttgcattggaagaacaggtgaaggaagctcaacgaaagattgaagaacaggttgcttattctcaaaggcgtgatgctgtgttagctgttcgtgaagctcaggtagctacgcgtgaagcagagcagaagtgtaggctcgagcacttgtcattggtggagaagtatctccttcaaacagatccgcacttcctggaattcatggcaagtcaatcatctagagagacaaccacaaaccctaacacaccatctccatctgcttcataggttgagatgtcttctcttatctcttttctgaacttaaaacatttatctcttttctgaacttggaactctctgtctccatctttcttttttgaacttaaactctatgtcactgtccttgtaatatttgtgttgcatttggtattttgttgtattaaaacatatgttgttctattaactttcgttttcgtttgtttcagttttggttttgattatcaattgccaaaaactaacaaaagtacaattacatttagacgttaaaattagtcgccaaagttcaaaaattaacgactatatttcgattgtgcgtcaaccaaagtagtcgtaattaaatcgcagattagtcgttaaaatgttacgactaaatgacgactactgttcagagtactgtgtattctagtgttttagtcatctgttagtcgtaacgtagtcgttaaaatataacgactaaatggcgactactgtcagaatactgtgcgttctagtgttttagtcgtctgttagtcgtaacgtagtcgtcccgttttacgactgactagcgactatttgacgacgacagaactttggtcgtaacatagtcgctaaataccgactaaattaacgactacatgttttagcgacaatcgatttacaactacgagtattagtcgccaaattgtcgttatttccgttttaacgactacgtggctattatatttgtagtcgttatttgtctggtttcttgtagtgttagagaagcaaaaagaatgttggtta

SEQ ID NO: 26829 - DNA, 528 bp, Arabidopsis thaliana columbia
cggaagcactttacgctccagcattttattaagcactcccattgctttgtgaacattacttttacaatacccctttatcaattcattgtatgtgcgtgtattcgggctgagtttacgtgattccatcaactccacaacgtctacagcatcttcaatcatcccccgcttacaatacccattaatcaatgcattgtaagtgattacatttggcatcaaccctttctctagcatctgacctagcaactctctagctttctcgaacttacattggctgcataaactatcaattagcaccgtataagtgtgaatattcggcttaatgcctgtctcttccatctccttaaccaagttaagagcttcagacttccgttctgatccacacaaagactttatgagcactgtataagtacgaactgttggaaaacattcgtcatccttcatttttacaaacaagtccatcgcttcatcaatccttctcgctacacaaagaccgtgtataaggtgagtgtacgcaacctcatttctacg

SEQ ID NO: 26830 - DNA, 612 bp, Arabidopsis thaliana columbia
cagtacgattctctcaacaatacttttgagagaggtcttgttactatgcataagatgcctaggatttgggttatgtatcttcagactcttacggttcagcaattgattactcggactcggcgaactttcgaccgtgcgctttgtgctttacctgttactcaacatgataggatttgggaaccgtatcttgtgtttgtgagtcaaaatgggattcctattgagacttcacttagggtttatagaaggtatcttatgtatgatcctagtcatattgaggagtttattgagtttcttgtcaagtctgagcgttggcaagaatctgcagagagattagcttctgtgttgaatgatgataagttttattctattaaagggaagactaagcataaactgtggttggagttgtgtgagcttcttgtgcatcatgctaatgtgatttcgggtcttaatgttgatgctattataagaggaggtattaggaagtttacggatgaagttggaatgctgtggacttctcttgcggattatacattaggaagaatttgttggagaaactagggatattatgaggagggatgatcaggtagtactgtcagggattttagtgtgata

SEQ ID NO: 26831 - DNA, 507 bp, Arabidopsis thaliana columbia
cactgttttgaaggccgatgtaaaggcgataaagatgtttatgagaatgtgggttgatgaagaaggaatcaaactggagagagacaggatagttgaaatggcaaaggtttacgttagagtttgtttagagatatatggtaacgtggtatggaatgcaagagagttgctgcaaactctttgggatgactttaagaagtgcgaagaggtgtatcgaacagcggttatctctttgtcgaaactggatgatgttgaaggtgcagaggatatatatggagagggggaaaaaaaagaacagaacgtaagggaacaggttaccaaaaaggcaatgatgctgttacatgttttgaatctgctcttgatcttgatcactttgagccttccttttattgtttgtcctccgaatttgagcattcctctggttgttttgagtgttattttgacgcacattagtattactaggcttcttagatttgtattcttttaggaaaaaggataatgcactaaatt

SEQ ID NO: 26832 - DNA, 606 bp, Arabidopsis thaliana columbia
agccacactgtataaactctttaagactatataagtatatgcaacagatggctagagcttactgctttctgtttccaaaggagggtcaaggcatttctggtgaaatgctcgattacacgttccatcacaaagtattatatcattgtctggaaaagcttctcgagaattgcattctgcacaaaatatctgcagaaggtaaaaaccatcaggcaattctccagtgtagtttccagtatgaactataaagacatgaataaataaaaagagttgcttacatgatcatgatgaatagatccatctgaagctatcactttctcttccatgcttcccacagaactaagcagatccagttggcgaatggcgtcgcgtagtccaagcttgcagtttaagatctctttccgggctctctcaagctccttgtctggtcttatcttttcccggctgaagaagacatggaaatacaagagtcaaaccacataattgtttgcaactaaatatggccaagattgtttcttcgcgttcgcggttgcatttgtatttatatttccactttgaactttacaaatgataattagaatactataagcaagtaaacgtaaatgcaaa

SEQ ID NO: 26833 - DNA, 1012 bp, Arabidopsis thaliana
gtgcttttttaatcttttgtattccagcgtcaccagagcttcactgccatccgggaagtcaatcattgcatcttttacaggaggttgcagaccattcactaggactttaactcttgctaccgctggagtaagttcatgatcaactagttcacccgctagaccaccaatgtcaattagcattttgggtttcaagtagtgaagagggattccttgaacatcaatccagaagggaatctcggaggagaaattatctgatataacaggttcctatctctgtagaattaccatccaatcatcaaaatgataaggtctgctgtttagaaccttgagcaagtcttcctcaaagtcaaaacaaaactggaagcgtcccctgccaagatctgacccaatggcttttccattcagattccatctgctagagagaaaaggtataagggaccacaggcgttgttgcactgcaggatttgtgagacgtcctatgagggtaagagagtttttttggaccaaatctgaggtatccagctgcggagcttgagtcttttccgggaaggctgagagtagtagtcatcagctatcgcttttcctttagcataataaggtatgcggcgatccatcttctaatttagtcctgaacaagctttaattttgaacagttcttgggcttgaactttgcaggatgagacaagaaggtagagatctttttgtgaggaggcagcttttgtagaagtttcagagatggttcaaagatagttcttcacactaggtgagattttcctgaaattttttcaaatggttcttcacaaaaagtgagactgttctctatccaaaccggacagaaagtttctagataaaattccaggaactaaaagagtaatgacaaacattccttcttcagggtaattgcattcattgcaaacaaacatcacacaaagtaacacaaagtacaaggagtacaagatatagaagtttagatatcgtttgggcagttgtttggactgcattcaatgagaaa

SEQ ID NO: 26834 - DNA, 601 bp, Arabidopsis thaliana columbia
ttagtcataaatgagaaataattttagtctttctcgcttgagaaacaagccaagaatctccgttttctaaatctttcgatattgtcaatttccctttattttctcgacggaatcataaataaaaaccctaaacctaaagtcacaaattcattcttcatctgttattcacgatttgtgttgtcttttcttttgcagtaagatttcgactttggaattgggagatctttccattatgggttctgagcaaaacgacagcacaagcttctctccttcagagccaaagctctgcgtcaaaggatgtggcttcttcggatctccatcgaacatgaacctctgctctaaatgctacagagacatccgagccacggaggaacaaaccgcttccgctaaagccgccgtcgagaaatctctaaaccctaataaacccaaaactcaaccacaacagagccaagaaatcactcaaggcgtcctcggatctggatcgtcttcctcatcaacgagagggggtgatcggctgctctccgttggatcaccgaaatcgacggctacgagatgcttgagctgtacaagaaagttggcgtgacggttaagtgtaggtgtg

SEQ ID NO: 26835 - DNA, 539 bp, Arabidopsis thaliana columbia
agttatactcttatactcgtatgtattctttgaagccttcagcatatgttgagcgatgaaaatgattgtttgagttgttgtggatttaaggtacatggcacttttgcaactgctgggtcagatggtgctttcaatttctgggacaaagatagtaaacaaagactcaaggtattttcctcatggcattgattttttattttgttaaccaagtaattatctaacagttttgtattctgtgtccccacaggccatgtcgaggtgcaatcagccaattccatgcagctcgttcaaccacgatggatcgatatatgcatatgcggtatgatataaatcttatttggtttcactttatttgtacatgctcatgttatatgttgcaaaatcgagatggtcttttacttggaatctaaaaccatcattgtgttgaaaaacctttgagagcatacatgaatgctttctaacatgtattattatataggcttgctatgactggagcaaaggtgcagaaaatcacaacccggcgactgcaaaaagcagca

SEQ ID NO: 26836 - DNA, 244 bp, Arabidopsis thaliana columbia
ggttatgttgtgcagatttgttagcggaatgagatccatcagcggttttgtcacgagctgattgtgtcaaatctgcagccttgtcacgtgctgattgtgtcaaatcagcagttttgtcacatgcggactgtgcggtttgcttcgcagactcggtccattgctcagctttctcctacaatatccatcataaccatatataaacatcaacaaacttaggatttggtaaaacctttatttgaaaata

SEQ ID NO: 26837 - DNA, 580 bp, Arabidopsis thaliana columbia
aatggcttctagttcttgatcacactttgttcctcttgcttccggtattaaccgtgtcaccacaagaatctgaggcttgaatccgagaccttgttggttaattcgaataagaagctcttcctccaaagctcttacttgatccagaatgtaaacaacctgtatgatcattataaaccaaaaagtttcttcttgtaagttagatatcaaattttgcaggtaatataaaactgaagagttgtataagtaaatgacctggcctccggtatcgggtaatccgagtacgtcttgctgaccaaaatagccgtggacagagaatatcacaacgttgaacactgtgggaagtctgctaaagagcaaatctaacttcccattgtctggtgcttcaagaacttctgaaaggataatcattgtttctttcactctctctgctgtatctccccaacctttctcgaatcccatctccttcaacctaagaaagtaacttttcaatcagatccttgttccggttcctcaaggaacttgatcagttgttttctttacctttgtgaaaagttcataaggtgtgtgtttgagtaagcga

SEQ ID NO: 26838 - DNA, 494 bp, Arabidopsis thaliana columbia
agataccgccactctatctagtgttagagaggagcagcttgcggttttattttagcgatgggacacatcgatgtgggagatacggataactactaagattgagcccaacgcggtgtcgtggaggtcgttcttaacagtgaatgagaacactcacttgctttggctttggctttcaatttgcggttacaggtggaagtttctttattgacgaggagaaggaagtcgcggtggtttttggtaaagtctacaaagacgaaaatggttatacaaaccaccgctctcacaacttagcagttggagtggatggttccttgaaaaaagtgtatgttggagaatctccagactgaaattgttatccacttgttgctcttatgtaccaagtttagtgcaacttaattagtccattttttacaatacctatgatctatttcttgtgtatgtaccggtttcttgtcttctctattgtcacaccttctgtttgtcccatatttgac

SEQ ID NO: 26839 - DNA, 529 bp, Arabidopsis thaliana
tgtgcagccacagtaccacctgttgtaatccactctgtaagctgccaaaaaaagggacatcaaaaaggcaactccaaaacattaatgtgggttattaagaccaaacaatataccagaggagcaaactgttgttgagatgaccgagatgactgggcaatttctctagcttcctcataataaccagttctcaagcaaaaatatatctgtaatcaaagaggtatatttaatcaatctcttacgttaagaaacttgggggaacagcaataagaaaattctactgttcaacttgattgttgaggacaaactgaaaatttaaagcgtgagtgaaaatatgtgaaacctgctgccaagtagtatcaactggaggctgcctacgagcatcaactgaatcaaagtccaaactcccataatctctcagacgaatctgcgcagtattgaaaaagaatcaagaaatgcaaacaaaccaatgtatatgattgccacaaaataatattcctgtgtatatatgcttcgtgttaagctttattag

SEQ ID NO: 26840 - DNA, 525 bp, Arabidopsis thaliana
gagaaaacgatacattattcaaaagcaagttcattatgatcttttgttacagattcagaaccaaagttttgactttcttaaggattgagattgcatacagccactgtctcccatgtctctagagtcttgtcctcggtatcggttttgcatagagcaagtcggtttaaccggaaactgagtccatcgaggctgctatcgagcgtgtaagctttctcctgcgcattcttcttctcttcctctgtcaactcagcgtaaagcaggctcaaatgcggcatgtaagctgcaattatgtgtagacagagaatattatatgaatcatgaatctaaaatgagagattatcctcaagattaccatcaaggcttcccaaaagcaacaaacaccacaccctatagatatcgatttcgttagcaatttttgtacttaaccaagccgatataatctcaaaatgttgtttgatttaagcaaaaaaaagtatacttggcaggctagtgtcaacactcccctaagagacttgttaagtactt

SEQ ID NO: 26841 - DNA, 587 bp, Arabidopsis thaliana
ctgatgcttcttgagctagttaccggacgcagacctgttgatctcactggtgaaatggaagacagtttggtcgattgggtccgtaatcatatggttaaatatattcatcacattaatggttcctctgttagaatcttgtgatctaatgcaaacttggttactttttttacacaggcaagaccccatatgcttaaacgcagctcaggatggagattacagtgaactagttgatccacgtctcgaaaaccaatacgagcctcatgagatggcacaaatggttgcttgtgccgctgcagccgtcacgactcagctagacgcaggcctaagatgagccaggcaagttttacttttgaacatgaccactcttttaaacatatactttacaccaagagaatgatcactatggtccaatgttaaaacagattgttcgggctctggagggagatgcaacgctagacgatctaagcgaaggagggaaagcgggacaaagctcattcctcgggaggggttcaagctcggactatgactcaagcacttacagtgcggatatgaagaagttcaggaaagtggcattggatagtcatgag

SEQ ID NO: 26842 - DNA, 487 bp, Arabidopsis thaliana
gatacaagcttgagacgtggaaaattcgaccagtcacgagtgtaaggacttacaacatgatcttgtctggttttatgtaatgggacattaatttttccatccatgtatattcaggttgcctgacgggtcattgatggagattaagaaggtttatgctttggatgctgtgtttgacaatccctgaagatgtgcctgaagatgtgaaaacgaataagcgatatgcaggatcgtcaaactggaccgtacaggtatagattagagatacacaaacacgcctgcaagttaacatgtgttactccttaatgctttttgttgcttaaatcaggaagctgctgaatgtgtgaaaaaagattttggaagcattgacattcttgtccattcccttgcaaatggcccagaggtagagaactcgtatcgattattggttacagtaagtgcattgtgttgtatcaaactatttcctaatggtgtcacatgtgggtttagg

SEQ ID NO: 26843 - DNA, 546 bp, Arabidopsis thaliana
cccctgacatatcatatttgtacctgatgatgcaagtaaaatcataaatatgaaacggttgcttaactaacatcattagattttggtttttagcctttgagattgggacaaaagcgatgaagatgttgtttgggaaatgacttacccgctgtccagcacaccgtaagcatatggctgacccagaaccgactgaaaacctgtctcccttgagccgtcctccttcgttgtcgacatagtatagtccgggaccctattatacaagaagtaaacggatttagcatttcaaaatttccttttgcgtgggaagaaaataacagtgttgaagatatgaagttggttttactgacagtttcgtcccatccagcaatcattgtaccaacagaaagtcccattccacggtatgaatagagcatgttggcaagaagtttcgaagctccggaaacagagattccctcttgtttgccactcatgtagacggcacttggatagacaaataaattaagagatcagcataaaatcacaaacaagatgttggtgataaatgag

SEQ ID NO: 26844 - DNA, 977 bp, Arabidopsis thaliana
agctaatctttgttaattatctaatatattaaagttaaaacaagatcccgtgtataaaggcatatcaacgtgcaaatgtatactagtcaaagtcgtcgccttgatctatattcttacaaagtctctctctgtctctgttcacatcggaaccacaagaatggagtctctcttctccacgatgattgtcctgctcttggtttctttttcctgtctcatttctacaggtaaatttccttgtacacaatcacctgcatttgtcttttctaaaacttcaaaagtcttttatgttctttaatctgcagaagctctcaccagcaactatggaaacatcacagtcaaatgggatctcttgaactggacgcctgatggctacgttgtaagttcttcttcttcgtgtctcacaaaatctcagagtctgctttaacttcaaaattgactctatctcaggcagtggttacagcctacaattaccagaagcaacgttcgattccaggatggaaaatgagctggagagggaccaagaaagaagtgatctggaacatgttgggtgcaaaaacgacagggcaaggaggttgttccatgttcaaaggaaatatcccgcagtcctgcgttcgtaagccaacagttgtcgatttgcttcccggaactcctttcaatcagcagatcgctaattgctgcaaaagcggtgtcttaaaacctggttcagaaagtgcattccagttatctgttggtagcgctggtaactcggttaagactgctcggatgccggcaaacttcatgttcacggcacctaaacaacagtacatatgtggaccgagtaagaacgttagaccaacgaggtttacaaccgccgacaaaaggagaataactgcagccctaagtaagttcacaacaaaaacaaacctcgacaaatctgtaattgtgattttgagactcacctgcttctttttatgtcttatgcagtgacctggaacatt

SEQ ID NO: 26845 - DNA, 581 bp, Arabidopsis thaliana columbia
tatcaatgaagatgtgattttgcaaaacatatatactctactgtcatgtggtgcatgcaggtttggaaagatgtggatggagttttgacttgtgatcctaacatttactgcggactcaacctgttccacacttgacatttgatgaggctgctgaacttgcttactttggtgcccaggtaaccaaacctcataaaacacttgttgtaccaaaagaccaaatgatttacctcttccattgcaggtgttgcatccactttccatgcgcccagccggagaaggtaacattcctgtaagggttaagaactcttacaatcccactgctccaggaactgtcatcaccagatcaagagacatgagcaaggtacgtgaagtcaaattgcatcactagtattacccttttttataccacgtacaacatcaccatgacctcttcttcctccttatcttctcctaggctgtattgaccagcatcgttctgaaacgtaatgtcaccatgttggacatcactagcacccgtatgctcggccaatatggttccttgccaaggtaacaacttaacccaattgatgcaagatactcct

SEQ ID NO: 26846 - DNA, 594 bp, Arabidopsis thaliana columbia
tagtaacctccgccagtgtgctttaaagatagcgtcattgtttcgcctcatgccggagcaggtaggaccgctgatgacgatggttacatcgatgctgggggttatatgagaggcacaagaaaagaaaaagcccttgaagcggtaacttcaaaggcccttatcacactgtgttacggcaagtaacgggagtaagtatgtcaaacaccgctgaaataatcaatttcccaaataaaaccgaacaaccgggaggtcgtatggccgacctgtcgaacgggtataccaaggtcgctaacgagatccaacagcttaagcctcgcctgagactgtcaggccgggaatggcaatgttttgaggcggtgatctggcttacctacggctggaacaagaaacaggaccgcgtgacaaatacggttattgccgagcttacgggcctgagcgatacgcatgtatcggacgcgcttaagtctctcgcagaacgcaaaatcatcttttcacagaagcagggcatgatgaaaatcgtcggtgtaaacactgacctttcagcatggattttagacaaacgggaaacgggaagacaattcccgaaaacgggaa

SEQ ID NO: 26847 - DNA, 517 bp, Arabidopsis thaliana columbia
catcctctatttatctccacgtcctccaaaggtgaaaacaagacttattgcgtgggttgcaagaagataggtatgcggtcttacctacaatgtaccatatgcaaatttgctctgtgttatcaatgcgctacaattccaacggaagtaagctacaaatacgacaagcaccctctttctctatgctatggagaacaggcagatgagacgtactggtgtgaactatgtgagaaaaaggttaatccaagggattggttctacacatgcaacgaatgttgtatcactatccaccttcattgcttatttggatcttcttcttatatgaagcctggttttagattcaagtattactcgtccaaagtggaagttcgtcgcaacagtgtcactcgaccgaattgcgttgaatgtggtcatcgttgtccaggttacatctactacaaaaacgataactctgtaacggttacatgttctttgcattgtttcgagacaaagttgataccgctgcaaacatggtgaactt

SEQ ID NO: 26848 - DNA, 591 bp, Arabidopsis thaliana columbia
cggtgcggccgttgtaatgtgcagccgtagcaaccggcgacgccacagagaggacaagggccagcgtctggaggcggaaccgttgtgatgatcaagtttgatgatgacgcgtcgtcagctccggagttagatatcacttgtcgcagagcagagaccatgatctcgtgctcttgatctcttgtcaagtacgaagaagaagggtgtggtgcaacaagtgtgaaattttcgttttgatcattaaatagaacattttctgaattatccattttggtgggattagactgacaactattcattttttcctgcaaatggtgtgaagaacaaaagggagtgagcatggtttttatagccaatgaatggaaacataactgtgatgctttttttagcgtttatgtggcctgacattttgctaccattcgtctaaattattagtcacatgaatgtgattataaaaacggaaaggctacctttgtatgtatgcggaaaaaaatttacaaaaagacgatcatactcgtttgacccaagaaaaaaaaaagaaaaaaggtcaaaatgtttcgctcgatcatgttttaaaaaaagaaacaaatagtg

SEQ ID NO: 26849 - DNA, 520 bp, Arabidopsis thaliana columbia
tttccaggcttttgcattggcaaccaaatcagggatcaacatttagcagccaaatcctaaacgaagtaacacaaagcatagagagtctcaatggcgtcaaagagggaacatggaaagccactctcaactattacaaacccatgttgcaagatcaggcgaatcaagctgagttcccgcgtgaatttgtaggaatttcgcttccggagagccagataagtactatttcgtcatcaggtcgcaaaggatcgtcgtggaagcagattcttcaattcaaatgatcatggagagccttcagtcttacaaatgcaaactctcgttttactttgaagggcttgagtatcaacttggggattttcgtttgagagttggtaaagttgttcctactcatgctgagaccattagaggcgtagtcatggaggtaacaaattttatatcttttgagtacgttgagatatattaataatcaatgttaatgattatctaacactctagttaattcataatttggagtttgtaatgt

SEQ ID NO: 26850 - DNA, 563 bp, Arabidopsis thaliana columbia
gatactcgcatcaatggctgattcaagtggacagatttctgcagtcgcaatggagcgccttactgctgcttctgcagctgagccttatgaatctgtttcatgtgcttttgtttcatatggcagctgtgccatggatttggctgagggttggaagtacaggagtcgattgtggtatggtgttggccttccctctaaacccagttcacttggtggtggtggcagtggttcagactcctggaaatctactttagaaaaagatgctcatggaaactggattgaacttccattggttaaaaaatctgtatccatgcttcaagctttgctattagatgagtctggactcggaggtggccttggaataggtggaggatctggtacggggatgggagggatgacagccctctaccagttgctggacagtgatcagcctttcttatgtatgctgcggatggtgcttctgtctatgagggaggaagactatggcgaagataatatgttgatgagaaatctaagttctgaacgctcctcagggaattcagttacattagatagtggtctcagat

SEQ ID NO: 26851 - DNA, 560 bp, Arabidopsis thaliana columbia
ggctttactaagtggcttcgtttatattccttttgcaggttccagtggggtgctcgtgaaggtcccctctgtgatgagcccatcagaaatgtaaagttcaagattgttgatgcacggatagcacctgagccgttgcatagaggatctggtcagatgattccaacggcaagacgtgttgcatattcagcctttcttatggcaactccaaggctaatggaacctgtctactatgtggaggtacatatatctctttccatttttgctcttcacaattttttctttagaatgataaataagagtagttatggtttttgtcttcagatacaaacaccaatagactgtgtaactgccatctacacagttttgtcacgtagacgtgggtatgtcacatctgatgttccacaacccggtactcctgcttatatcgtgaaggttagttttgttttgtttgtgtcttcaccttccttactttgtcctgttatttgagtgaatgatgatgattcattgagtggtgttgatcaggcttttctgcctgtgatagagtcgttgggtttgagaca

SEQ ID NO: 26852 - DNA, 589 bp, Arabidopsis thaliana columbia
cggttggaaagctgagcagtacatctcttgacagtaaagtatgaacagagagactgctaaacattgtacaccaaatagaagaagagtaagcgtaggatatggaaagcgtagagtcaagcctgaatgaatgactcagctcaaaacagataatctgaagattgaaaactcttttccttgctagttaatactcacttagccagaatagatgctgggggtgcatcagtcccgtcccaaacaaaaacagcgctcgtatcttcatcggcatggagaatctccatcacaagaaacagcagaaaacaaggtagtatcagtcaacaaaacataaaaggtatacagtttgagccaaaaaaagatttgtaagtaacaatgaagtgctttctcatgttaatagagagtatagagcatattaccctacacaccaaatcaaagcgttttcctatctacggagcaaggttttgttctgtaagatatactctgcatagctaagtaccaaaacaggaaatgaaagcttattggaactacattggtaacaaaccaaatcctcaccttcgaacaaggcaaaggaagaaaccatctactacaagcagcg

SEQ ID NO: 26853 - DNA, 713 bp, Arabidopsis thaliana
aaaaaagcttctgtgtttgcctcttttgaataaatcagaaaccctaaaatcgccactctctcgtctctcttcgcggtccattctgcttcatctctcccggcgaaaccttaatcgaacagctcggattcgatcctattctctgttgttttctaagaaagatggagtggaatcgggagactctagtgttcctttcgcaatgttttcttaacacgctctctccgataccggagcctcgtcgaacggctgagagagcactctcggatgctgctgatcaggctaactacggcctagccgttctccgtttggtggctgagccagcaatcgatgaacagacgcgtcacgccgctgctgtcaactttaagaaccatctccgttcgcgatggcatcctgctggtgattctggtatctcaccgatcgtagattctgagaaggagcagatcaagacactcatcgtctctcttatgctctctgcttctcctcgtatccagagccagttgagtgaagccctaaccgtcattggtaagcacgatttccccaaagcttggcctgctttgcttcctgagcttatcgccaaccttcaaaacgctgctctcgctggcgattatgtgtccgtcaatggtattcttgggaccgctagttcgatttcaaaaagtttagttatgagtatagaaccgatgctctgtttgttgatttgaagtattgcctggataatt

SEQ ID NO: 26854 - DNA, 551 bp, Arabidopsis thaliana columbia
tttctgttcaaacaaggtggtgtctcagcagaagaggcagccaaggtcttatttcgtttccctaattgccattcttcttacaaaacaaaggatctattaccaatttgatggttggaggatatcaaagctagtgactggttttctgcttataattgcaggatctggtgaatatactggaagtaatgagagtcatagcggttgcgttatcccccgttgcaccttgcctaagtctgaggatctattcacagcttggctatacagaggatcaattcaatagcataacctgggtaacatacgatttcattcaccagattttagttaccgtttaacaaaactcgcctgagttttggctttgatctaactcttattctgtctttagagtgacaccaaatggggagggctaaagggaggacaagtaatggagcaagcgagtcccgtatttgcaaggatcgagctgaatccagagaaagaagaagatgagaagaagccaaaggttggtaagaaactggcaaagcaaggtcaaagtagtagagcaactcctacagtagctg

SEQ ID NO: 26855 - DNA, 547 bp, Arabidopsis thaliana columbia
tattagctttccgatgaacagcatccaagacatcatagagaacaacagcagtttgatatatttttgtacgttgagaactagaactacaaaaataagcaagaaaacactgtgaacgaaagacgcaagtgttatataacgaaaacctttagctatagtacaaacctgccagcaccagcatttagcaaatcattgatgccctcgtcaccatattgttgatagaaactttgcatttcatgtgcatcactactcttctgtcttgcctttagagtactttcattattctgcacaagtcaaagacacatgatgatttaatgatgaagatatgaaaatctcaagcgagctagtttaatattggtaccttttctaaccattgaagaattgtattcttgaactggcgaacatcacgtccacttgatgtgggatcaagctcgtttgccttatctagcgcatgtgaatgacctgacagtatatttatagaatcatccacagatttgatgtcaagatcttgaagaaataaactctgaagtcgtaacgaatattgatttat

SEQ ID NO: 26856 - DNA, 1226 bp, Arabidopsis thaliana
ctcttgaagtagtcgaagcagtggtgaacgagatcggttcagatcgtgttggaatcagactctcgctatttgcagattacagggtgtcaggagactcgaatccagaagcattagggctctacctggtgcaagctattaacaagcatggcatggagtcgtctaaggtcacatggttctacatagaacggaaacccttgaatgaatcttcgaatgcacggaatcgcttacgcccatgcgaaaagccttcaaaggtacgttcatagtagcaggaggatattctagagaagacgggaacaaggcggtggaagagggaagaaccgatcttgtggcttatggacggccgttcttggcgaatccggatctgacgaggagattcgaactcaatgagccgttgaataggtacgatagatcaacgttctacacttcagatcctgtagtgggctatacagactaccctttcctcgagaccacagatacaacaactgcttaaggggtttattcagatgcattattagcaaaacatatttttcaatcacataaggcaaaaagcttgcctcaaacaagcttcggcagtgtccaactctccaagtttcatcatttccactacaacgtaccacctatataaaatcatcatcgtccgcaacaaactataagttccaaaattgcttacacaaatgcttcaacaaaactaaaattggttatacaaagtcacaaatgctttcgcaaaacttacgccgattgataaacttgcacaaatatacgaatatcatggttaagaaaccgaatcatttatgtgtagtgtaataataccgtatacgaattaaaattcaaggtacttcaggtaaatttaaaagtgtggggcctaaaataaaatatacagaaactttgggtactaaattatatattcttgcaacttgtttgtgtttactttactatctcattctttgcgacggtgacccgacaagattattgcggggaaacagaccgagaagattaagcgtaagattctcaacgaatgttggagaaggaatctgatttgactgcaacggagaaaccaaataacaagcacgcggctgattcgttttccagcgaggatttggtctcacgcggagaaaccaaataacaagcacgcggagatcaattatttttattttcgtagaatctgattgaaatattaagaaaaaagagaaaaaagagaggaaaagagcaaagtaagtaggatagat

SEQ ID NO: 26857 - DNA, 870 bp, Arabidopsis thaliana
gtccaacttctaccggcaaatgccctaatccaggacatcgatctttcgtcttgaacacaatgtaagccgagtaacgagttccaggagatagcacacgagcgcttgtcttgccacgaatctcaaaccaacacacatcaagaagctctgctattttgttgaatctttataacaacaatgtgtgcaaatcatcatattgccaattccaaggatttaaagagggggaaaaaagagttacctagattcaggaattgaaatccattgccaatattcaggactacttccccatgtgatccaaagttcctttgaagataacatgatacacctttttccactcgctttttctaaccaaaagctctttgatttttcggaaaataaaataaaacatcaaaataatcagaattacaactacaccaaaaatgttctatcgtagcaagaatcaattttcttaaattaggtttttaacaaatctatgcgaaaactcgttgatttaacacatgattttcaatttgatcattgttctccaacgtataaaccaaagaatagatagaatcatataaatacctttttgccatcttcgattagaacaggattgtggcagagagcgaaataaagttccttcttcgatgcaaaaactcgagatcgagaaaccaaagattcatactccggtggaagaaacttgtcccatacgcaatcggaactaacagctgattcaaaggttttggaaaccgatgcagcaacgcacgcatctcgtggacttgtgaaagagattatgttggagatgcaatcctccggcaagacatcaaaaggtgacgtcccggagaaacgatctctcaccgctatgatattgcccatcatcgatcggtgcctttg

SEQ ID NO: 26858 - DNA, 872 bp, Arabidopsis thaliana
atatcgaatccatctacattggcaaagggagctttagagacaacttgaaaggtttcggtgtgaagatcgatcgacagaattttggtttcctcgcactcggtgaaccaatgaagcgacccatctacgcagacaggtgcgggcaaccaacaatcctataaggagcagctggtgaaacatacctccaagcgttggtgctaaagtcgaaaacctcgcatgtagtagcgttttctaggccaatttctatagagttgtataaccaaacgggcttgtatgtgcctgtgagtttgtctttaccgaatccaagcctagggactctgtatccaagatcgtagaaaccgtcgctatggcaataaggagttgttgtaattggcagagaggaagagggtgataccatctagtggcgggattgaacacaaaaccggatttgaatttatcgaagagacaaacgagaccgtcacagctatcctgggaaacagagtattctttgtcctcctcctccacctcctcccaaggagtagggatcttgacagatgatgatgaacccaacaccaatgtagtaagagcttctatttccgaattaatatcagcacaacgggagaccatgagaacatctggattacctgattgctgacgctgtgtgaactgtcttcgctggaagaatggagattcaatagttgatttccattgtttcgatacagccttgaatctcagcagaggatccgcatcaagtctctctaggatgcactctacgacctcgtggggcagcgattccatcatcaagcaacgttgctttttcgacattcttgtaattgcagacaagtcattgttgatgaagagatttaagaggcttatttatagataaaacaggaaaa

SEQ ID NO: 26859 - DNA, 540 bp, Arabidopsis thaliana columbia
tatggaaccagacttttgattttgtagttgaagacgggttacatgatatgctagtccttgaagtctgggaccacgacacctttggaaaggtaaaaccaaaccgcaacaacactgttatttgatggttattattctgcgtcattgcaccaaatggatgtttttctcgtttggtttattatttattgtgttggcattgggcattggaaaaatgaaacattgtggctttacttttgtggacaggactacattgggagatgtatcctcacgttgacaagggttataatggaagaggagtacaaagactggtacccattagacgaatccaaaacgggcaagcttcagctgcatctgaagtggatggctcaatcaatttatcgtgattcctaagcttaatcggtagaatcaatttatcgtgatcctaagcttaatcggaagatcacaacttcgaatgtacatgttgtctagtagcgtcaaacggatgtgttttgcaaacaaagacgagtctgcatgtagccagaagctgtggcccggaatatgagt

SEQ ID NO: 26860 - DNA, 579 bp, Arabidopsis thaliana columbia
  unsure (1)..(579): unsure at all n locations
nnnnnnnnnnnnnnnnnnnnnnctaaagtggcaatggaatggaaactggcgctgcgctgcatccggaatatcgcacactgccgatggtctggtacgtgccgcctctgtctccgattcagtctgcagcagacgcgggtgagctgggtagcaacggcattctgccagacgtcgaaagcctgcgtattccggtacagtatctggcgaatctgctgaccgccggtgataccaaaccggtactgcgcgcactgaaacgtatgctggcgatgcgtcattacaaacgtgctgaaaccgttgacggtaaagttgatacccgtgcgctggaagaggtcggtctgaccgaagcccaggcacaggagatgtaccgttatctggcgattgctaactacgaagctcgctttgtggtgccgagtagtcatcgtgaactggcacgggacagcttcccggagacacatggctgcggctttacctttggtgatggctgcacggttcagataccaaattcaatctgttcaaaagcgtcgtatcgatgcatcgatgtgaacagaaaacgggagcgcatcatgattgactcgtgattgt

SEQ ID NO: 26861 - DNA, 575 bp, Arabidopsis thaliana columbia
cttatttatttacattcactcctcatatttcctagattctctcagagaagcccctaatgttttaatagtcacatttcatccccaagaaatccaaagaccttcatacgaagaacctatatgagttacttcataaaaattgaaataaccgatgtattcagaccattttttctctataatcaaatgattgaatataaaaccaaatcaatatgttgccaaaaaagaaaccaaatcaatataagccaaaacttgaagaagaaagaaactctctcttcatagcctacgcattctcttggctggtggagaactttgatcagaatcatcaaaagacaatcggcgtttacgccacttcctgaagccggcggttcgcgagaaaccgctatttccggtggaggtgtcatatgtttcctctcctcaatctctagcgttctctgataacacaaatatacattttcctacaaaacccaacactcctaagattatgatcatcaacatcaaacaatcaaaatcgaataaaaagacaccaagatttatacattctcattagaagtcaccaagagatcgaacaaacttgttag

SEQ ID NO: 26862 - DNA, 473 bp, Arabidopsis thaliana columbia
ctaacacggtaatgcaaatccttgtgacagatacacagacaaaagcgacatattcagctttgggatgatattgggtgttcttttaaccggaagagacccgacccacccgttctgcgaagagtctgcaagcggaggtagcttaggacagtggctgaaacatttacaacagtctggggaagcacgagaagcattagataagactattcttggagaggaagtggaggaagacgaaatgttaatggctttaagaatcaccatcatctgcctttctgactttccggcagaccggccttcaagtgatgagcttgtccacatgcttacacaactgcacagcttttagcccaacgtacttacatgtatcaaaacctctgtaaaaccaatccagacatctgcagttgcatcaatatattcttttttctttattcttgctagtaactggtttaactttgatcacgcaaatggtacaaaaaatt

SEQ ID NO: 26863 - DNA, 577 bp, Arabidopsis thaliana columbia
  unsure (1)..(577): unsure at all n locations
tatatgtacgaaatgaaatcgacaatggtggatttggtaaggacgtaaggtagtgaatatttatacccattgtgccggcgtcaactgccaccgtagaaagtggcgtgtgcattctgccacggtccgccactgtaaacgccggggattttggcgtttgttgcggttaagagaaaggaagccgtaacggccaaccacaagccgaccctaaacgcagtcgccgtcattgagttaataagagagagagagatgtgtattggatagggacgagagaaagcgggaaggactacgagtatttatggggactgatgctggttgggtgtttttaccttccagttaaagttttctgtaatttttcagatttataggttttggtaggtaaattaattgctgcccatctcattggtttgattggctttcactttctgagactaaaccgaagtgtgcaattgtggttatgtgccaaaattaaattagtgcagatagattagtaaaccanaactgaaaaatagatgttgttttagttatgttatattgaaaccaacagctctcacccaaaatttaattcggtatcatagtt

SEQ ID NO: 26864 - DNA, 543 bp, Arabidopsis thaliana columbia
tgtgtgtttgcagttgaagatgaagtcgttttgagttggtggatgcctctggtgatgggttctgaccgggttatgtgacgttcttgttgtggactaggcgacgactcgtcagggtggtggctgtttggaggcgatttaggttgtcttccggtgcgggtatttggctgaaactgggtcggcaaatgcatgcgtgcaagaggtgtttgtcttatttggcttgtcatttggcgattctcaagggcttcccttgttcctagtttattttcgtcttctcgtgtgccttggtatggtgtgattgttgtctctctagtatcatttggttcttgctttcgttcctggcggtttgacttcagaaagatgtcttaattttgtggcattaccagtcttattgctgcttcacgtgttcttttggaaatcttagtgagaacctctatggaacaataggtcagcttagtgctttggtctccatctcttctttttgcgagtttatcttgttgtttttacctttcttggtaatttggctgtctggtttttagggattag

SEQ ID NO: 26865 - DNA, 429 bp, Arabidopsis thaliana columbia
tccagatgcaaatcaatacatatatacaactaaagcacctagtaacaagctaacaaactacctaaaaggccaaatccccaaacaaaaaaatgttcgccagatccatagttttttttcgaacactactagttaagagaaggaaaacgcgaacacgacttaccttgttgatagatggatcgagccactcgtaccagcgagctttacactgtttagcagacttacgaacgagaagcgacgagatccgagcccattggttcttaccatacttcatcacggcggctttgagaatctcatcttcggtgttcttccaagcacctcccttaatcataatcctcatcttcgctcagctgtgtttgatccaaccgtactccaattcaaggtctctgaagctaatgctcgtggaactcggtaagaacgatgaacagaagg

SEQ ID NO: 26866 - DNA, 451 bp, Arabidopsis thaliana columbia
gatggcgttaggctaaccaatagcccatagattaaccttgtgatcttctccgcctgtaacgagaaccctggaggacttcctcccaatcttaagacaattaacagcagcagaatgtgccacaaattcctcttataaaatgtatcacataagtcaaggctaagctatactctgggatgagactctagtcaaagaagaaattgactaaaagtttataaatttagaagcacacagataccgaaatgtcataaatgacttgaaaaaactcaaaacacaaagctacgaagtgcatacagatctcgtgaaccagagcaaaaagcagcagatcaagcacgacactggagtcaatcaataagtcccagaaataaacaaaccctaaaagatgaaatcagagagataaggatacggagcttgtaggcgcgcttggtgttcatagcggaaacgaaacccttac

SEQ ID NO: 26867 - DNA, 540 bp, Arabidopsis thaliana
tgaaaacaaaacacaacagtatgaaaagtaaagatatatgagcattaccaaagtatcttgaactttgggataagaacgtgatccagatctgtgactgtgtggatttaaaccatcacgattaaacagtccagaagaacgcgctttttcgcttttttctttaatttttggaatcctccaataagctaccataactctccaatgtgcagctagaatccattcaggttgtttacctctcgactttgcaaggctaaccattcctttgagccgagcagcagcaagtacttcaaagtttgttttcactagatgctcaattgaagcatcccactcaaaccatgtctataatacaaagtatgcaatttgtacaaatataacaatcgtttctgaaaatattacagagaactgcaattaaaccaaaccaagcttctttgtaataaattggcactttttccaactataccgtggtcctttaaaacaccctttaatgatctgtcgaacacgtgttaatacttcggtgttgtttttgaacctgttacatgtgta

SEQ ID NO: 26868 - DNA, 931 bp, Arabidopsis thaliana
gaaccactcccgttaacatccatggcaaacccatcgccaatctttccaaaaccggtggttggatcgcagctttcttcatttttggtaactttcttttcacttacatctagattatcagtagttctacgtgcagtgcagcttagttttggtggaatggttgcaatgttttaggaaatgaaatggcagagagaatggcgtatttcggactctcggtgaacatggtggcgttcatgttctacgtaatgcataggccttttgaaagttcatcaaacgcagtcaacaacttccttggcatctctcaagcctcctctgttcttggaggcttcttagccgacgcttacttgggtcgatactggactattgccatcttcactaccatgtatcttgtcgtaagtagtactgttttgttctctgtattttgtttatttatttatttatgacttatggttaaggtcttgtgcaaatggtgcaatttgaagaacatcgtctaatacgcaagaccgaacatatgttatgtgatggatactttgaaatcttttcttttcttttgttttgcatgtgaaaagggtttgataggaataacattgggggcaagtttgaagatgttcgtaccagaccagagcaactgtggccagttatcattgctcttaggaaattgtgaagaagccaaatcttggcaaatgctttatctctacacggttctctacataaccggattcggagctgctggtataaggccatgtgtttcctcatttggtgctgaccagtttgatgagaagagcaaagactacaagacacatttagaccgtttcttcaacttcttctatctatcggtcactttaggcgcaatcattgccttcactttggtggtatatgttcaaatggaacttggttggggtatggcttttggcacattggccgtagccatggg

SEQ ID NO: 26869 - DNA, 713 bp, Arabidopsis thaliana
caccatttccacaattaccccttttttttcaaccccaccagaagctattaatactacttatacccccaaaacttagaaattaagctttaaactaccctcccaattgaaaaaacaaatcgtactaagagaaatcaacaaaaaagacgagggaaaattgaaatatccataatgtaaaatccccattatgcccttccatcaatcacctaggccttggcttcgccggaaaactgagagcttgccggagtttcctctgccccgacggactcgaattagagctagcgataggcattccgaaagtcatggtctgtgagagattcaccatatccaccattgattgcgtctggtaagaagttgtagttgaatcactcatatcgcctctcgccgttgctcgctgccaggagtgcgagctcagaccggcgagcacgtaagccctacccgaagcctcatatacttgacggctcgccattctctcttgcatctccttcagctctgcacacagtgtgacacacaattgatctccggctcgacccgacacggactcggtcagtacccacggcaagtctcgagaaccgacacagcttcagtcaaatcaccgcgctcggctaaaaccctagcttcagagattgcttctgccgcacgtaatctgatcctctgtctgtcaacttcaactgacactacaggtcttctttctgtcatcactattggcctgagaa

SEQ ID NO: 26870 - DNA, 1758 bp, Arabidopsis thaliana
  unsure (1)..(1758): unsure at all n locations
tcaaaataaatatgtagttttttatcacggtagagttacacctaaaacagttcaatctaattaaaaagtactcgacaaacgaaacacctttttagccatgcgtgttcacagcttcccaaagcaagttcttcaacacaggattagtcgcatctctagcttgaatcgccgcgttcttcaaagtcctaatcgtccacacattagcttcccaccacgaaagactcctatacggtagattatgcttcttacaaagctccttaaccaccggcgatactgtccggagatgacaacgaggaagccgaggaaacaaatgatgctctaactgaaactgcaatccaccaaagaaccaatccataaacgatctacacgatatatcaagcgtaccggcggtttgtttctcaaaccaatcgtttccgtttggtggaccggtatacacatctgctgcgaaatggtttaaacagaactgaacatgttgaatcgccgtgacggcgaacgtcacgaagacgaagatgaatctctcttgccaattcggaaggaacgagactaagagagggaaccatgtccagaaaactaaaattccggcgatgttcaaggcccgatctgggacgtggcgtttcgagaatagcaataggaatgtttggatgaagaggttgattcttccgacgcacattactgggtaaaatgtccagtgttggtagctgattaagaatcgagctagaggatcgaatgttaatttcctgccatagaaacgtgacgtcatcgaattgaagaattttgtagagacggcgaagatcgggatgtgttgtagatccggatcgtggtcaaggctgttacaagcgatgtggtgagcgttgtgcgtccatttccaccacgcgattgagatgccggtgagacagttaccggagagaagctggattagtttgttacacggtttggttgacgtcaccgtgtagtgaccggaatcgtggccgacgtaagcgctttggatccagaggagaccgagtaaaacggcggagatgaggtgagcccagatgctggtacacgccaaaacgccgtagagaaccgccgcgagcatgacgccgacgcacgtgagtgtgtaaagagtcacgtgacctttttttgtcgaagaggccgcgtttggagaactcggcggcttaaccgccggtagtcacgtgagacgtctgacacgtggtggtctctcacgtgatagccattgtgaagcttttctaagtggtgccatgcggttccgggatggtaagcgatgaacgcgtcggtgacgtcttggccggcgagattgagaatcgctgcttcgcctccgggatgagatttaacccaatcggaaacgtcgtaaactttaccttgaatcgaaatccataaatctccaggtttgttgtgttttttcaaatcctcgcttgtaacgtatctcttcttcgtttgatccgccattgatgaaccagagaaagagatttagttcctattatccaaagtgcaaggaaatgcacagaacccaatttgagaaaggttgcaaatgcaaaacctttctctctatggattcgtaattcacagattctgaatcgattctacgccttctcttccttatatttgtgtgtgtgttttttgtttgtttactgttttggaatcgatgttcgaatctttgacacttgtgttttatttttagaaccgttttaaatggttaagcaataaaaaatccacntggttttaattacattttaactctataaatggaattgttgattagag

SEQ ID NO: 26871 - DNA, 894 bp, Arabidopsis thaliana
tcccctcacacatatctaacttgttcatcttcataaaacttcctgacgcctcgttgttcctcctcacatacccatttcgatcatgctcaaccctatccctcttccgaacaaacttctcttttgctccaagggttttgcggtcaacgccacttctacgtggaggtggtttcataaactcatcacttgattccgaatcactaacaaccattctggatctcttctgataattctgcctagtttcagtagaagacacagtcctaccaaccccatcgctcttctccttcaagcttcgaggagtattcgaagcaatccgtgaacgctcaccagaaccaccacctccttccataaacgatcactacacaaaatcaaagtaaggacctttaatcttaatcccgtcaaaatccgagatcaaatcaataacgaaatacctaaatcgataaatcctttactcgataagcatcaaaaagcgccctaaatcaccggatccggggtgttggaaacaaaatgagtcccgatcctatcggaaaagaaggaggtataaaagttatcggcgatgaatcctttaagaatcgacgtagcgagtttaagagtttagagaatccactgtcgccggtttccccggcggccgacaatgtaactccgccgctagagagaggaagggaagaagagagaggcgcaacggagcggtacaaaaagatgaggaaaccaaaacggaacttttttttatttttccatcccggatttatttatagtaatccatccttattaaaatttcaccctttagtttttgatttgatcaattagcccctctctattgtgagaatcgactcattaatattttcggtaattggcaatggtaaaagtggaaataacacagagaattaaaatttgatg

SEQ ID NO: 26872 - DNA, 518 bp, Arabidopsis thaliana columbia
gttccaatactgagctgacttttggagttattcatcttcatgatctctaatccgttcagaatcgcagtagggtaatccgtgtgaacactcgatcgaccgatgctcacacggattcttttagtcagttttgctgatcctgtgacaaaatccatcgcgtatgcaccactcaaagtgttggataaataagagctcagatcaagattctcaacaacatccatagagtcgacataaagattgaagtaaagctggtttagagctttactcacgatatcgcagaaatgaaaccgtagaaagtactgaaaacccgggtcaacatcgaaatcccaagtcacattgaagttgctagacgggttatccgcagaattcatctcggtgcaagtaccatagacagttctaggagcagtctcctctgtagcaaaaccaggaacataatcaacagatgcaatcttagacacactcttaactagattcttctcaactagaaactcagaatcaggctccaaattctcgaaagagta

SEQ ID NO: 26873 - DNA, 630 bp, Arabidopsis thaliana
ttttcttccttgccttgtcactcactgtgcataactctgatgctatatgattaggtcattcaactaaatattgatgaagcaattcgcaaggcaattgcacaagagctcaaaataaatcaatcgtcacagtgtccaaatcttgttacctcgtaccagtcattttatgacaatggcgcaatctcactaatcttggagtacatggacggaggatctctagcagactttctcaagtcagttaaagccatccctgactcctatctttctgccatctttagacaagtaagaaacacaggatacacaggaaactatacgcttcactgttaattggttgattgatgtgatttattggttctgttattgcaggtgcttcaaggattaatctatcttcatcacgataggcatatcatccatcgtgacttgaaaccatccaatctgttgatcaaccacagaggagaagcaaaataactgactttggtgtgagtaccgttatgacaaacaccgcagtttagcaacacatttgtggggacttcaattatatgtctgtaagtacttatttgctcttgacattgactagtttgaaccctttcgagtgttataaaatgagaacttaattttccttttacagcagag

SEQ ID NO: 26874 - DNA, 585 bp, Arabidopsis thaliana
tgtttgagtctgtaatatttatgtcttcatcgtttctaaatgaaaaattgtccttgttatcgtcgtattatctgcttatcgttgctactactaatgatttgagtatatacatcttactctaactattgtagtgtacttaaaaaaagagaaatctttgaaatacattttaaaattgccaccctcttaattttgtaacgttaccaaaaatctctgcaagagcaagaaccatctttgaacctatgaaaccgaactcgatccctaacaatgatctctctcttataaatcttagaaatatgtttgaaaacaacgtgacagtccccacaaattctcaggttgtttataactctcaccggactctcctcgtccgcaccatccatcatcatcagtccgtaggccacgccaatttctcgctgtgatagcacaaagcgttctctttctcttcctctcctatgtcgtgcaacacaagtcctgtctgcgccacgtaaccatcctctcttatcttgaacctatcctcatcaaccaaaataacaagaaagcagtaaatcaaaagcattaaaattcaccaatctcagctcttagaacttg

SEQ ID NO: 26875 - DNA, 451 bp, Arabidopsis thaliana
gtgtgctctaaagcatgatttggaggagaataaagccgagagcatggtggggatagtggtggtgcacgaggaggagaagtcggtggagtattaggaggaggaaccggtggtgcacgtggaggagaagttggtggagttcttggcggggatagtggtggtgcacggggaggagaagtcgatggagttcttggaggatgaattggtcgtgcacgtggaggagaagttggtggagttcttggacgagatagtggtggtaacgcggaggatatgttagtggagttccaggtggagaaagtggtggtgcacgcggaggagaatttgggggactctttggtggagaaaccggtggtatttatgggggagcagttgctggagtctacggaggaagaattggtggtatccgcggagaaagtggtggcgtacgtgtaggagctgttcgtgcagttcttgg

SEQ ID NO: 26876 - DNA, 600 bp, Arabidopsis thaliana
cgagtcttttcacggaaagcacttacattgtgcgtgaaggagaccccgttaacgaaatgatgttcataatccgaggccggttagaaagtgtaacaacagatgggggaagaagcggtttcttcaacagagggttgttaaaagaaggagacttttgtggtgaagagcttctgacatgggctcttgaccctaaagcaggctcaaacttaccttcttccacaagaacagtgaaggctctgactgaagtagaggctttcgctcttgaagctgaagagctgaagtttgtagcaagtcagtttaggagacttcatagtcgacaggttcaacaaacatttaggttttactctcagcaatggagaacttgggcttcttgcttcatccaagctgcttggcgtcgctattcaagaaggaaaaacgctgaattgagacggattgaagaaaaagaagaagaattgggttatgaagatgaatatgatgatgagagtgacaagaggcctatggttatcacaagaagtgagtcttcttctagactgcgttcaacgatatttgcatcaagatttgctgctaatgcattgaaagggcacagacttaggagctcagaga

SEQ ID NO: 26877 - DNA, 346 bp, Arabidopsis thaliana columbia
tcgttgtcaacctaggttcattctctaaccacaagaccaagaagttgcaattcgtcaacttacaatacaagagagtttggtgggaagctggcaaacgttttgtcaaacttcgtttatcaactaaggctttgaagaccattgagaagaacggactcgacgctgttgccaagaaagccggcattgatcttcgcaagaaatagatatgatgatcgcaaagtttatgatatacatttcttgcttctccttttgcagtactcgtacattgcctttctagatgttgggaagtatcaatggaatctctgagttgttgtatcagacactgtcaagagaagactttaaagagaaa

SEQ ID NO: 26878 - DNA, 347 bp, Arabidopsis thaliana columbia
atgatgaaacaaacatggacacattctcaagcaaactcatctcacaactaaatcttaagtagaaagagtgaaacatggctaatcacaaaaatctcttctttctatgtttcttaataggtttagggttatgttctgctagacgagcactactctcctcctctgaatccgaggctgaagtcgctgcctatggcgtgaatagtggtataagtgctggtcttggtgttggtattgctcgtggtcctggaggaggatctggttacggaggtgcaagcggtgaatgcggtgaagctggtgggcatgacgacggacatattggtgtgggcaggaggtggtcgacatggtggtgg

SEQ ID NO: 26879 - DNA, 572 bp, Arabidopsis thaliana columbia
taaacgtggaagtttctttggttgcgggtgccaaagcttgagtatgatgaagaccgcgacactaaaccttccaatcgccggaggtttcgacgttttatcagaaggacattgccgctacatagagttccggttttggaaagcttgcctctcaagtttagtactttaccatttcaaccagaagatatcaaactatgcgttgaagctgcagtttctcactgtgtgcgggacttttcattgattattatcctcatccatacaaatttgctacattgccattttgcgtgtacacctgcaaatcgctcgagacccttgcactctcttatgcaattctcatggttgttcctcgtatggcttgtcttccatctctgaaaaacttgctactacaaggagtgagatacgtagatgaatcttttcaactactcgatgaatctcatacggtttgtttccctccctgaaatctttgcaccttaaagaagtaatctcctccgatgaaagatatcttcgatcgcttcttgccaattgccctgttcttgaagaatttggtcatggactagatgaatatgatactttgg

SEQ ID NO: 26880 - DNA, 609 bp, Arabidopsis thaliana columbia
aatggaatatgattaattttgttagtgatgataattactagataaaatggagtataattgatattcttcaatagagggattatttgtcgatttatttgctgataatattttgtaataaaatgggttgaataggaaatgagacgctggagagactgggatcgataggattgttggcaaacttcatggtttatctaaccaaagtgtttcacttagaacaagtcgacgctgcaaatgtcatcaacatttggtcaggtttcaccaatctcactcctctcgtcggagcgtatatctcagacacttatgttggccgcttcaagaccatcgctttcgcctcattcgccactctcctcgtacgtataatatttccccatttaacttattgaaaattttatataatctttttaaaaaactaaaataaaaataaataatctaatgtgtctacaaatacacaacatttacgtacgtagtagtatttactttatatgttcctaacacctcaaatccgcaactattcgcggcctactgccagcatgggtcagtgctttagcgtcactgttcgaatagttgcatccacaaaaaacatacaactctaaatagacagtctatatt

SEQ ID NO: 26881 - DNA, 580 bp, Arabidopsis thaliana columbia
ctcaaatctttttcctctacactctgttttcaaagttactatatttgttaataatttcattacttgtttgatttatgttcgtttccatgaatatctgttactatttctggaaattattagaaacaataataagttccattactttagtttgtatactctgtttttagggtttgtctctatgttgcgccttgtttgaatctgaaatttgatggatcatattaaaggtttgatatttctttgttttgaatggatataaaggttgcaagattgtttggaccggcgatttttgaagcctccaaattgaaagtgttattcttaggagttgatgagaagaagcatccagcaaaacttccaagaacttacactcttactcacagtgacataaccgctcaattaactttggctatatctcaatccattaataactctcaggtaaaatgtataaccgtacagttgcaccgtttaggatttagggttgcgtaaaagtgatgtaatgttttcggatcttgctttcacagttgcaaggatgggcaaatacattgttctgggacgaagtagtcggcgagtggaagatagtgaa

SEQ ID NO: 26882 - DNA, 553 bp, Arabidopsis thaliana columbia
cacatgaaaaaacagttgacgaagaggtgattattgagctcaatgggcttgggataatataaaagagaatcattcagttgggcctccgacagttttggcggatctgaccattggatccggtgagggggctgatgtctcccatcttaatcattgcccttgcaaagtcgcggtagaaggcattgagattgtggctgtaagctatgacgagcgagtcggtaggaccattattaaagaggacttggtctgacgtaagcaaaccttttttgctcagaagttgcttgtagaagccgtggtcgaacctatcgggagagcggacgtcaagattggctttcttgttgtctccggagccactggtggcaggacagttcctccgtttagagatggcgaaagaggtgtcgatattgcttgcgttgtagattcggtttctgaatgtaacacattgggctcgtccaatggtgtgagcaccagagagggcgaccatgtcacgtgtggacaaaccttgtgctttgaaacggtttatgaggttgctaagggtagtgatcggaggagggat

SEQ ID NO: 26883 - DNA, 391 bp, Arabidopsis thaliana columbia
ggtttattagtagagatacctgtgttgttgaatcagtgatcaaaacaatactgctgtcagaaaatatatatgcaattgattggtggactgaaaaggctagtcagcacccagagctgcagagtttcgccatgaagattctgcgccatacacgtgaaggtgcttcaaaggacagagctgaagagcagcgtagagagcatggatgcccctgctgaccgaggtatctcgcgctagtacggcgttggctcggagtcgcccgactactatcttcatagccgagtacttcggtagattagttggaacgattgatgattttgagtgaattgaacgttcggcgtatgagtggtgatcggatagctagtgttcgtaggctccatgctcgcgcatcgaacta

SEQ ID NO: 26884 - DNA, 548 bp, Arabidopsis thaliana columbia
taaatccgaaccaaactgaatcctaaaataaactaaaaactacaaggaaactaaaccctacacgttatgggtttgcgaagaaaaggttaaacaaaaagatttataaagaagaatgtgatttaggcgtgagtgtgaacaacacacgtacaagaagatcagatcaatagagaacaaaagcaagcacaagtacacactgattctgaatatggcaaatgaaatgtagacttttatatctatggtctataatttgaagcccaaaattgatatatgggcttttagcctaggaccggcctatgattcgttgatttcacagagttacacgtatgagggctttttacatggagctattacttcaaatccgtcgtatggcttgggctaaccatatacttcttagttttggatacgggcacggatcttcctaaaccaacatataggtcggttatgtaattatttagatcttcaggggtaaatctgacaatattgcatgacccgaccgggtgtttcttatagaaacccgtatacccgggcattagttttctcgctatgga

SEQ ID NO: 26885 - DNA, 551 bp, Arabidopsis thaliana columbia
tcatagaggatatgggaaagcaattccttttgtagatgcttaatatcatagcctttagacacgttttccaaaaaacagtgagctggaaattgacgtgaaaatcgatcatagagacacttggcaatggtggatttgcctatgcctcccattccccagatccctatcatatgaacctcgtcttcacaaccaatattcagaaggagagtcatcttcatcatatgagcttccattccaactaaattaatcaaatctgtcgacttcatccttggcagtcgacttgagatgcctccaactacctcggctatcatatctgcctcatccacgctaacataggcaacacaaaaaaatacatcaaccagattgtggatggctaaggttagatcaagaaatcagcagaacattgtacttagtactctataaaagtagagaaaagaaagagagattttaccaatttctggaatgcttgcctgatagattagcgacttgggtgagagctcttctccatttagaaaccttctcctccatctccggatctgcttcgtacctttgaa

SEQ ID NO: 26886 - DNA, 575 bp, Arabidopsis thaliana columbia
aaagaaatattatttgttttagagtatgatgcttgtgactactagttgcacgattggttcgtatttgagagagatacgagtgattagaagcttggtttagtttggattagtgtaaaccgattttgaggttctaatgatgtagtatattttcttggtttaaagtactcgctcctatttcttttttatcaaaaagttctatattgctaacaagtgtaacatcttttataatcccttcaaattgaagcagccaaacgtggttgggcttacatatgatctttaataattatatatagactacaacataagataaataattttaacattacaattacaaatgtgtcgaaacgaaaaataaaatcttcttttagctttgatcgatcaattaggtaagtttgtccctcactccctcttatcatacttacgagcccaaatgttctttccgtaaatcataagctcttttttctgctcgtcatcgagtacgcggtccacggtagtaaccgagtccaagacaagcctcgcaaatagtgattgttgctcgcagctcctatttgcgtttgcattgaaagacttttgtt

SEQ ID NO: 26887 - DNA, 570 bp, Arabidopsis thaliana columbia
tgaagttacgccattttaaaatttattaacttagaaaatgtgctattttcggttatttttaactagattgaagataaatcagttactagtaagacaaaagatttggcgatgagtactgtacaatcgtcaatgattacttttgtacagattaataatttaagtaggcttctactttctagtactggtgttcggtgttcacttgataaagctaggatcttttatataaaatcaagaaagaatgataaacaaaaaaatatcaaagaatcaagagtagctctatgaaatgcttacttttaagtgaagttattgatatatgaaaatagaaacaaaagagataataaaatcagatattataaagaaaaatcaaaacctggaaagtgagggaagtgagaggttggcttcgacgaagagagtacttagcattagggagagaagcatgaagcaagcaggccaacgattcgaacatgttaagactcagtgagtccctaccatcattatcttcttccctctcattctcctcataaaattcgcccatcgaatctgtatagtcatttttaattgttaatatac

SEQ ID NO: 26888 - DNA, 563 bp, Arabidopsis thaliana columbia
ttgtcccggctgtttagatgaatgggatatcaagaaggtcttcacagtcacagtagataatgcaaaaggtaatgacaaagctttgcggttgttcatagataatttgatattgcgagatcctgatgcactagtcaaatatggtgactatcttcacatgcgttgttgtgctcacatcttgaatttgatagtcaaaaatgggctagctaaggctaagcatagtataatggctattcggaatgcaatcaagtacgtgaggtcatcgggtgatagactcaagtcttttaaatcgagggttgagtcaggaaatgcaactagaggaagcttatgtcttgatgttgtcactagatggaatccacctatcttatgctcacagctgcgatcaagtgtaggggtgcatttgaagaaatgttggctgcagataagttgtacaatgagtacttcatggagacagatgaggatcatgaggatgaggatgatgagagtgacgaaatagatgagaatgcaagaaaatgtgttggtctccaacatttgttagttgggaagcagtgcaaaggttatgtaag

SEQ ID NO: 26889 - DNA, 476 bp, Arabidopsis thaliana columbia
agaggatccccgcatctagagtcatctatgttttaatgtctgcatcatcttttgaatttcagataaccagctgcaactggatagagatatcagtttacatgggaagaagaaggttcctaacaaaagaatcaccggttttcagtttttccccggagattcagacaaagtgatggttacttctgctgattctcaaatacgaataatctgcggtgtggatacaatctgcaagcttaagaaaggtccaagtcaagtttcttctctttcttcaggatatgtgaaggatcttgtgagtttgtttgttattgatttggtggatatattgcagcttcaagtcttcgaacaacactgatgagtccaacatttgcttcattcacatctgatgggaaacacattgtctcaacaatagaagagtcaggcattcatgtttgggacttctctcaaccccacaaaaaggcatctgtctcagaaccaaagac

SEQ ID NO: 26890 - DNA, 581 bp, Arabidopsis thaliana columbia
agagattcaggtctcgccatggaactacgatcgatgagctccgtccatggacgacgctgtgacaagccatcacggatcgaggtggagagacgtgagaagaaagtacgaaaagcaggtgtgttgattggaggctgagattgaacagcttgctgattggtgacaggtagcgtcggtggagttgccattgcggcggcgcgtgaggttagatgcggctgatttggctgagaagtttcgatccgttagtctgaaacgaaaaaaattcaagagctgaagttgctgaatcagagctccgtgtagattagatattctagggcctgagcctgaccataaaggttaaaccggcccaaaacctcaagtcgctggttcgattcctcctcgtgcttttaaacaatgttttatttttgtttttggattttttttttttttaatcaaaccctaaaataccgagagagcacgactaacgtcttcactgacgccacggtctgggtggttcattcttcttcttccgccgatttcttcacattttctctttctggtattcaaacattgtaaaacgacaccgttagcaccatgtttgatga

SEQ ID NO: 26891 - DNA, 1068 bp, Arabidopsis thaliana
cacaattctccttcacctacaactacatctcctgaatgaatccaatctaatatttgactctaactccttctttgatccaccaaaactctcagatgtttcagtatcattgtaacttttctgagataaggaacaagaattattaaaaccaatccaattaaccattccagatgtttcagtatcatcattccctttaactgagataaggaacaaggacagtttaccttttttccagctaagtctcggaccattccctttaactcctgaatctcactttgcatttctgccatctttgcgtctctagcttgcagaaatgctaacttagtagccgtaatccctctaccaaacccccttactcgtccaggtttgtcttttcccaaaatcttgctcacagcatcttcccttatgttttcacaagctgatgtagagtccatttgactatcaagtgaatgtatttgttcctgatcatacaaacatttaaaccaaaaaaaactaatttatcataatccattacttatacacaggccataacaagttccagaattctcaccatagtctcagcaaattgaggcttcacaggtctaccatcagcatgagtgtgtcccgcaatccatacctttctcctagtcaccttacttgggtctgtacacttttttttctatataaagtacatatatatcttagtaccaatttgttctaacaagaatacaatatatatatatatatataacttcaatttgtcattgtataattttcaaaatcaacagcctaccaagctgtgcttgaggacccaaccgtagtcgtggtgaaacgttaaaataaagttgtggcaagtaaaatagagtttgaacagtaaatcaaggttgtgggaaagattaaccaacattgaattttgtaccgctaactcagtcattactattcgaaagacgaggagctattggtctacaagctcacccctggtgagtcataaactatcttgttggtaatgtaaccttttgagtccgaaaaagattcttcctttttgtatttccgaacaggggacagagaagttgactaggaacgcggatgaag

SEQ ID NO: 26892 - DNA, 556 bp, Arabidopsis thaliana columbia
cggcggagtaactatgactctcttaaggtagatacatgcacttcacgagtgcagaccttttcacttattcagggaagaaaaagagaggaaggaagaggaagaatgcagaagagcttccaatagttgcacatgccagtgccactactgggatacctgacttaaatggaacaaatacagagccaactttggttctgcctcaagttgagcctactcagcgcagaagacgtcggaagaaagaggagtcacctaatggattaaccagaggaatcacaattctcttcttgaaattttcctcccaagtgtcaatgccttcaagggacgacctaacctcgacattctctgcgtttggcccgttggattcttcagaaacacacgtttcagaagaatttagtggtgcacaggtcgcctttgtgagtagtgcagacgcgatagaagcagttaaaagcttagagaaagctaacccatttggtgaaccttagtgaatttccggttcagcagaaactgataaccgttcaaaggaacattgccccacgaatgccggtaactcacatgttag

SEQ ID NO: 26893 - DNA, 501 bp, Arabidopsis thaliana columbia
cctctatgcgccagtgtgctctaaagcatgataattgattctagcacattaaagattttgagaccatagtgtacgtaacgatattgaagtttcaaacttaatacattattaatttttctggacgatattcaaaccaatttgagtgtcttttgggctccacaacccctgcttttaagctaaaccctttatgtcaaacttgttattcacgtttgaatgaatagagaagtcaatatatacgattgataacatctagctagctactactttcatgtttatttgacatttttgtatggaaacggtccaaattaacgtgacatcgtgatttatgattgccgtgtataataaattaaatgcaggtgaggtcaatgtcaaaggaacaagtagaactactcagatctccattggacacttctttcaagaacaattcaagaccgtgtaacccctcaacggccggagagttgagatgtccacgaccacgagcgtgtcgataaaaaagaaacc

SEQ ID NO: 26894 - DNA, 547 bp, Arabidopsis thaliana columbia
cgaaataaccgcttgacatcaataggaaacaaaaactcataaaggactttgacatacagatgggcccattgtttatgaccaatccttatactatatatgggccttattagttaaacctaaggcccaaagtcagattagggttttcagaaagtgtactataaattcttcttctttaaacaacttcgtctagtggaacgacgacggcacaaaagcttcaccggagatcagagacgcgaaaatggtaaattgtttcttctctttcgatgtgattttggaatttgtaaagttcgttgactttgaagaacaacaatacatggttgattgatttattgtattgtttttcagatctatcataaaagttttcaatctaaatgatgtttgtattttgattaaccttaaaagtctcttgattttgtatgtgtgtgagtgattcatttttgattttatgaattttgaaggtgaacattccaaagacaaagaacacttactgtaagaacaaggaatgcaaaaagcatactttgcacaaggttacccaatacaagaaggg

SEQ ID NO: 26895 - DNA, 644 bp, Arabidopsis thaliana columbia
cactcctcagcgtccgcagttgtctctgccgtatccaacgctcttgccgtccaaacctctgtcgcagtggtcgacggtgagggagatgacccttttacgtctttgatcggcgaaatatccccgatgacattaacttgctgcgacgagacagcagctgcggcggtggcgacgctctccgctggagatctgatggcgtacatagacggagcaaatcctccggagagtcttgttcagatcgttaggaaccgtttggaggataaaggattgattggtttgatgtcgcttttcgattctctctcatcttattcgacgtcgtcgggttattcgtcggaggaagaagctccagtgagaacgacgtcgtatggacggtcgatgagtagctcagcaagaatggcaaggaagtcggaggcgatagtgtgtaatccaaagagctcgttaatggcagtgatgatccaagcggttgctcatcgagtgaactacgcgtgggtggttgagaaggatggttgtttcgttggcatggttacttttgttgatatcttaaaagtttttaggaaatttttggagaatgacatgtgaaaagttttttaaatatattttcttgtgttttgtcgattactaaaccccacaaaaatgtgtatttaggg

SEQ ID NO: 26896 - DNA, 511 bp, Arabidopsis thaliana columbia
ctattcgtgggatcgacagatcgtgtatccctgctccactaacatcctcagaagtagtggatgagctactttctgaaattccggagataaaagataaaagtgaagaaatcaagcagttctggaataaacaacacaacaagacaatcatcgaaaagctatggctgtctgagtgcaatactgttcttccaaactgtcttgaaaagattagacgagatgacatggagattgttattctaggcactggttcgtctcagccttcaaaataccgaaacgttagtgcaatttttattgacttgttctctagaggtagtcttctcctagattgtggtgaaggaaccttgggccagcttaaaagaagatatggtttagacggtgcagatgaggcggttagaaagttgagatgtatatggatctctcacatccacgctgatcaccatacaggtcttgcgaggattctagctcttaggagcaagcttttgaaaggagtgcccacgagccagtgattgtggtg

SEQ ID NO: 26897 - DNA, 745 bp, Arabidopsis thaliana columbia
ttctgagtctgtctctagttgggtgttttatcttcctgatactgccaccaatgttatctctcacttggttcattttgcctctgttgtcaaaacagataggaatcttctgtatgccaccttcttctatgatacctcttcataaccatccgggcatgaccgtgctaagcaagctcgtttatggttcaatgcatgtgaagtcatatgattggctagagcctcaactgaccgaaccagaggatccatcacaaggtaaccgtcttctttctgttactctctcagtttttatccaatcactcttctggtctaattgtaaactattttgattcataagaagcaagacctgctaaactggtgaaggatactgagatgacggctcaaagcccagtaacaacattatatccgaaaagtggtggcaacattcactgtttcaaagccatcacccattgtgctattcttgacatcttagctccaccttactcttcagagcatgatcggcattgcacttacttccggaaatccagaagagaagacttaccaggtaatacaactaagctctccaaaaacccgatcccagaaccatattagaacctttagtgatattgatttggattgtgaactggagcaggtgaattagaagtggatggagaagtggtcaagacgtgacatggcttgaggaatttcaacgcctgatgactttgtgatcgacgaatccgtacagaggtcctgtcattagacttgatgatga

SEQ ID NO: 26898 - DNA, 585 bp, Arabidopsis thaliana
aacaaaatcacaaacaaaaaaagaagaagaagaacatttatcctatccataatgttctctttgaacatgagaaccgaaatagaaagtttgtgggtatttgctcttgcatcaaaattcaatatttacatgcaacaacattttgcttcccttctcgtcgccattgctatcacttggtttaccataaccatcgtattttggtctactccgggttgaccggcttggggaaaatacttcttcactcgccggtttatttctctcgattacaaccgaaaatacaagaatctcattcccggtcctagagggtttccacttgtgggaagcatgagccttaggtcaagccacgtggctcatcagcgcatacgtcgtgtggctgagatgagtaacgccaagcggctcatggcgtttagcctcggtgatactaaggtggtggtgacgtgtcatcctgccgtggcaaaggagatactaaacagttcggtttttgctgaccgaccgggttgacgaaaccgcttacggtttgatggttaccgagccatgggatttgctctcaatggtacttattggcgtacgctgcgtcggttaggctcg

SEQ ID NO: 26899 - DNA, 584 bp, Arabidopsis thaliana columbia
tcgtagacttaaatctcctaaaccaaaaactctacactattaatactgtacagctaaaagtctacaattatgttaggatatctacactatcctaacgtaatgtttcaatcattcaagaaggtttcgaaatcgattttcaatgtattgtcttgaacagacgagggacaaggcaaggttggagtggtccaagagccagtcttcaaactcggacaatactctatcgttacttcttcctgattgttgttgttgttgctgctggaccgccggaggattaggagtcatagttgggactgcattcgtctgaacattagcagaatacatattccggctaaactgttttgcctctttgctctgagataccggcacagttgagatagaaccagtaacaatccgctgtgcattgccttgtgaagccacgggaggagcatatctgggtaggctgcgagccttgtgaagcaacgggaggagcacagcaggtaggctgtgagcattgtgaagccacgggaggagcaaagcgggtaggttgtgagccttgtgaagccatgagaggagcataataggtaggttgtaagctttgagaaata

SEQ ID NO: 26900 - DNA, 557 bp, Arabidopsis thaliana
atgatgatgagagatataattcagtttgcgtgtttgtgtatttattacgcccctatctatgttgcttcaccaaaagaactgtaaacacctaacttcaaatatctgcatttactaaggcgacgataacaagatcagagtaattgaaggctcaggtacgaatttaattctcaagttactttgttcatcatgtgtatatgagtaaaaagtgagcgctaagtaagggttttaaaactttgtctcatacgaccgctaactttgcaattatgggtgattatcgacaggtgcaatggcgatggttgttcggctggttcgaggagaatggaaaagagatgagtacgggtgctatgaacacgtagcagaactagatgggttatgcttggcggtaaaactccgggaaagggacacgttcgctaaagttgttaccgtcgtgaaggagagactgtcactcgggtcggaggatgaagtggagttgtcttacaatggctgcagtggatgatgggccagatttggcagagggcaacccaatcctattctcgatgatgaggatatgactttgt

SEQ ID NO: 26901 - DNA, 465 bp, Arabidopsis thaliana
  unsure (1)..(465): unsure at all n locations
nnnnnnnnnnnnnnnnnnnnnnnctaaagcatatcagtgccctggcagctgatggtcgttctctggaacacgcgccaacggtggaaaccgtcgtcgccggaccgttatgtgaatcgggcgatgtctttacccagcaggaagggggaaatgttgaaacccgcgccttgccggaagtgaaggcaggtgattatctggtactgcatgatacaggggcatatggcgcatcaatgtcatccaactacgatagccgtccgctgttaccagaagttctgtttgataatggtcaggcgcggttgattcgccgtcgccagagcatcgaagaattactggcgctggaattgctttaactgcggttagtcgctggttgcatgatgacttgcctccagcgacggagttgacactgaatgacgacgtaccagcgtcggactaaagacattagtgatttccgggagagggcgattatcc

SEQ ID NO: 26902 - DNA, 480 bp, Arabidopsis thaliana columbia
tctaagtttccattactttcagctgtatctttcttgttctcaccagcggagtcgttgaaaagttcttcagtaccccagcgtagaatatcttcaaattccttctgggatcccgacttgtttacaaaaagctgatcgagcatcaacttcttcttggccagctgcaaaatgcgctcttcaacgctggcacggacaacaagtctgtataccaaaagtcgtttggactgtccaattcgacgagctctattcatggcttggatatcagcgtgagggtctgaaatcagagtcatagctcataacagtatcagctgccgccagattgataccaagaccacaggcacgagttgataacagactaacgaaccgcttcttgtccaggctgaaacgtgctatagctgcctgacgatcagcgtcagccacagaaccatctaccctgtcaaatgtcttaggcccaaattctatgctgaggtagcctccagaatg

SEQ ID NO: 26903 - DNA, 581 bp, Arabidopsis thaliana columbia
cttcttcaatcgaaagaaatgcaaacaaatcagaaattaattcaaacatataaacttttctttttcattactgcgaacctcaatgcgatcggcctggtatgcaaattttttttccttaagatccttgatttctgggtttaatttcgacaattgctccctttcttctggagttaggtgatccacaagttccgttcccatttcagcttctttcatagacatgctggatctaacctggtcaattcgtgttctaatatcacctagtaatttctcctgcaaacagatgaaacaatttagtatttacaacatgggggaacgatataattaacactaaaggccactccaaaaaaattgaattgtaagaaaaaaggcaccttatattcaatggctttatgtatagcatgtttctgcttattagcgttacgtatctcttgcttaagttgctccactgtaatttgcagacgtccagtctgcttcaagtctctgctgctcagtaacaagctgtgtaatctgctgatctatcagtgagacatgttaaggaaacgctacaatcaacacacatcaatgaacaatacgatgtagtt

SEQ ID NO: 26904 - DNA, 594 bp, Arabidopsis thaliana
gtgctgaagttcttgccatctttgctatttttcatccatccaaaacatgaaagccgaggacttccattctgcatgacatgacaaaacaacatcaacaccaaagataaaaaaccttcgatgatttttttttgtaaaaaccattaacttttgtgcaatggaattacctcatcaaagagaacccgacaagtattgagatcatggtacaatttgagtccactctgcctacaatattctaaagcttcagctacataaagtgcaactctcaatcgcatagcccattccatggtttgtttctcccctgtaattcgaggcaagaaatgcaaaaaaactcaagtacttgtaccccaagcaaacaaaagaaggtaggttttgggataccatacaatgaaatagatgtttggttaggctttcattaggcatgtactccgatacaagcaacctttcatctccttcacaacaataacctatcaaattcactagtcttacatgcctcaaactgccgatagcccgagcttctgtctgcataggagacaattagtataactcttggataaagcatttgcgatatgaataattcaacacatcagcgaattg

SEQ ID NO: 26905 - DNA, 514 bp, Arabidopsis thaliana columbia
tcttgacacattatgtaagtcatccccctgccgtctcacttcactaccgataacacacacaacctacacaaacaggccgaggccaacaaggtcaaggcctagtccaagacgcgaaacccaaacatggaggaagagaatgagaggagtcatcacagagccaggtgttacgaagaaagtgaaactacaagtacaagcatatagtactaagtactagtcgcaatttggtcacagacataatttcctcgaaaactgggtacattgtaatacttcgtcggacaaccgtcgcacaatctaattttcaatcgccgagtaagatgcttgcgtcttctcagaatctccgtgagttgaaggaaaatgattcgcggcggaagacacaacattacttccgctccggcgttttcgaaagacgcaaagaagcttcttttatgcacagccaacaccgtctctgtttacagcgtcggcaaatggttaaaggttttatctctcgactcgagcatcgttccttttagggttt

SEQ ID NO: 26906 - DNA, 419 bp, Arabidopsis thaliana
tccccttctcttttgctgccttttttagccaggattaacgctcagttaacttaccagagtattgcggaccgttgtgaccaggaccaacctcatcaccggttttctcggcagcgggaaaaccacgtcgattcttcatctgttagcccataaagatcccaacgaaaaatgggcggtactggttaatgaatttggggaagtcggaattgatggtgctttgctcgccgatagcggcgcatttgctgaaagagatccccggcggctgcatgtgctgcgttaatggtttacccatgcaggtagggttgaataccttactgcgtcagggaaaaccagaccgcttgttgatagagctcgacgggctgggccatcgaaacagatcctcgatctgttaacgcaccagtctatgaacagtggatagatct

SEQ ID NO: 26907 - DNA, 436 bp, Arabidopsis thaliana columbia
tagaggatacctgatgtacctacggccttttgtaggagctactacaaatgcacagctcatggatgcccagtgagaaaacacgtggagagagcatcacatgatccaaaagctgtaataacaacatacgaaggcaaacacgatcatgatgttcccacttcaaagtctagcagcaatcacgaaatccagcctcggttcagaccagatgaaacagacaccatcagcctcaatcttggtgttggaatctcatctgatggaccataccacgcttccaacgaacatcagcaccagaatcaacaacttgtcaaccaaactcacccaaatggagtcaatttcaggtttgttcatgctagtcccatgtcatcctactatgctagcttaaatagcggtatgaatcagtacggccagagagaaacaaagaacgagactcaaaatggtg

SEQ ID NO: 26908 - DNA, 499 bp, Arabidopsis thaliana columbia
atccctcaataattccatcataagtattattttacaaactttactgaaaaaagcaacaaactaggggaatattttgcttagggtgaaagtaagaaaagaaatatctaaggaagattgaggtaaagcatctccttaaattccaactttctagtatcactataaaaagtatgatgcttgttaggccaataagtcaaccaaacgcaacctttaacctcaaactccattactttcccaatagccgttttatcaactttccacaaaacgctttgcccataactatctcctgcaaacacaactcctccttgcttcgtgaacggtctaaacgcgctcgagtaccggttcttgaaccaagctcgagggttcatcatcgagactttcgatggtttagaggacgaaacttctcttccatcgtcaagatcatggagaaaccaagtgagattggcgctataaccatgaacccattcctcgaacttccatggcttcatgctttttgttgtgg

SEQ ID NO: 26909 - DNA, 553 bp, Arabidopsis thaliana columbia
ggcaaaagttttgatttgtgtgaggctgatgttagatgttaagaatatggctaaaaggttcaatctttcgtcaagaagtctgtaatacgtaatggttatatcgatatgaacgagactttgtgctaaggaagagttaatttttaagattaaaaaaaaatagacaagaataaggtgtatctaaaaatggaaagaatgaagttggaaaggtcaaaaatgatttagaaaatgatggatcataacagctagaaaagctctccttgaaaaatggaacaccattgaatagaggagaaaaatgtgatgcattcacatagatatatgattataaaggaagaaattgtttgagagaagaaggaagcaagtaagaaatggcgagcggacaggatgaggaattcagtgtgagggccggccaaatcgtgggccaagctcatgtcagtctttctgttcaatttctcttttacttgtgccttttgcgaccgtattagctttaaaatattagtacacagagttttgtttgacaaatgatgtttggtatcaggtgaaggagaatgattgc

SEQ ID NO: 26910 - DNA, 493 bp, Arabidopsis thaliana columbia
tccccactttagtttcattatgatctgactctaatggatttgttcaaataacgaaattatttttgttgtttttatccaggtggagcttgtggttacggagatctttactcggcggggtacgggacaatgacggcggcgttaagcacggctctgttcaacgacggagcttcttgcggagaatgctataggataacgtgtgatcacgcggcggactcacggtggtgcttgaaaggagcttctgtggttattacagccactaacttttgcccaccaaactttgctttgcctaacaacaacggtggttggtgcaatccgccgcttaaacatttcgacatggcacaacccgcttgggaaaagatcggaatttacagaggaggaatcgttcccgtcgttttccaaaggtcagaactttttaaaagaccaaaaaacagagtaagctgttattttgcaattgttcaaacttcttaacgaaaagctctgtgttttttgtgtg

SEQ ID NO: 26911 - DNA, 296 bp, Arabidopsis thaliana columbia
ggtataagatcacaatgaacataaccatgattatgaatcgagaccaatccttgtagaatcatacgagtgaagtctttaataacagaatccgacaacttcgttcggtttctggtgatgaaattagttagagtaccagcagctgcatactccagtgacatcatgtaaacttcttgtccattgcaatcaattccttgaacaagagagttcccacacaattgcacgatacaaggacatcctctgagttccgacagaattcgaaactcttggtctatagaaccgtagttctcagagtccat

SEQ ID NO: 26912 - DNA, 589 bp, Arabidopsis thaliana columbia
ccgatgaaatattaattttacacttggctattttcattgatctgcttaatgttgctgtttattggtttcatacgtgaatacaatctaaaccaaatgattgtgtaaatgtttaggtggtggacaactactacaggccggacttgaagaaagctgcacttgctagactcagcgccatcagcaaaggtctcagggttgccaagtccggtgccaagcaaagaaacagacaagcttaagcttcttctttcacaatctgttttttttgaagtaaaagattttgttgaacaggttttatttaagttgttgctttgaagttgaaccataatgctattctcctttttcattatccttattataaaggagttagaagtttatcttgttatgcttgatgtttctggtgtgcttgtgttacattttgttagatccttttatcgaatcaagaactttcttaaaatctctattctagattttattagcaaatcaaatgtaatcaacaaccaagtccttatatattatgacttttgaaagcctaaattgactcaaaatagcaaacataaatgtttagatttgttgcacacatgtgatgtcttgt

SEQ ID NO: 26913 - DNA, 519 bp, Arabidopsis thaliana columbia
tgcagtttgatcttgattttggagatatccggcaatattttcctgtcaacttggtcctttccgggatctttaaaatatgtcaggacctttttggtgagtttacgtctgtactctaaaatcttttgggggtattaataaatttttgctttgcttctgtggcttgagaatatttactatccatttatttgatcctcgtcatagcttgctggccaacttaatgatttcgccatgcaggaataaaatttgaggaggttacagaagttgatgtctggtatcatgatattcgagcttttgccgtctttgactcaggatctggaaagcttttgggatatttctatcttgacatgtttacaaggtccattagcaaccttacttcattctcctctttacttttagagcctccatttcattttgagttgtgataataattttgtttgacagggaaggaaaatgtaatcacagctgtgtggtggctcttcagaataacgcactgttctccaatggtgcatgtcaggtgac

SEQ ID NO: 26914 - DNA, 591 bp, Arabidopsis thaliana columbia
tgtgcatatattatgttgtgcatcatcaagtgctaaactgtggtcttttgtgtctctgtagataaatttctttttttgtgtgtttgttcaggggaataagcttcttctttgattgtgttaatatatatgggatgtttctgttaatccctagctagttctaatcataccttttgctaagtttttaaattttttggatagcctgtttcattctccgtacgattagccttaagggtcaaataacctgtcataaagtgttgagaaaataaatctgagatacatgcatgtgaagctgtctctctggctaaaacattttgttgtaaccattttgatatataaatatagaccaccctcacgtccattgcatcacaactcagttttcataagcaaaaaggcaatggaagagtcacgatccaacagagagcaaaggaagcagacgaagaagaaaacgggtcgtgggtcaggatccgggtcgatccagataaagatgaggaaactccgagtgcttataccgggtgggcgaagattgaaccaaccggatctgcttctaacaaagactgctgattatattatgcatttggagttgaggattag

SEQ ID NO: 26915 - DNA, 582 bp, Arabidopsis thaliana columbia
cattctttttgtgatagcacttcttttactcaccatctgtctcaattgtactacagggaaatcccaggaaggcgtattactaaggatcaaatcaatgtgttatgcgcaattattatctttggttcacctcagcaccgtctgagctttgcttttctattataaagaatgttcaagcttttagattactgatatattgaagtgttggtatgcattgaatttgcgtttcagtgtgcaaatagatctctttgacagacatatcagttgaaatacaatggatttgttattgctaatgactgagattttgattcgattgtcataactttattaatgttttggaagtctgggacataatacactaagcagcaaggttattaaagagaaaggtaaatgaaaaaagaaaagaaaagaaagatgatatgtccttcctagttgatgatatcgcagggagggaaattagcagagcatctctgagggagctgaagagccatggagcggtcatgccagagagtggaggccattggcaaggagcaaagacaaggacgaccaagtgtgcaacggcagacaacatattcgggcggtggg

SEQ ID NO: 26916 - DNA, 613 bp, Arabidopsis thaliana columbia
  unsure (1)..(613): unsure at all n locations
ttccccaaacaagttcatttccggatttttttcaccagagggattcgcatgaatggtgggaggctgcagagatgtctgcagaatggttgaggatgtgaaactatcccaagtcccaaagagatcatcttcttgacatttgcctatgtcagacatcacgcttgtatcagtattctgcttctcatccacgctctgttctttaacaccgttcttatcttgcgcatgtccataaaaaatctcaaattgggaactttccatggtttgagaaagtggattattaggagtcttggagttagccgagcttgcaaaatcattccagtcatcgtcatcatcatcattaacatctgtaggggtcttctcaatggattttttttcattggtttgccatagatcatctccgatccaatcaatatccatggatgaatttccattgccaccgacaatctgtccctcattcttgtcatggacggctgagtcgttggtttgggcncaccagtgacattccaaataaatcatcttgcaaccaatcgccagcttttgaaacataagcagttgaagaatctgccggttgtgcatagagtaaatcttttctggaaccaaagacagaatccatatg

SEQ ID NO: 26917 - DNA, 532 bp, Arabidopsis thaliana
caccgatgctttatagttgtggaatctgtaacaaaggttacaggagttccaaggctcatgagcagcatcttaagtcgaagagtcatgttttgaaggcttcgacgagtactggagaggaggataaagcgatcatcaagcagcttccgcctcgtcgtgttgagaagaataacactgctcaattgaagggttcgattgaggaggaagagagtgaagatgaatggattgaggttgattcggatgaggatttggatgcggaaatgaatgaggatggtgaagaagaagatatggatgaagatggtattgaatttgagttggatccggcttgttgtttgatgtgtgataagaagcataagactatagagaaatgtatggttcatatgcataagtttcatgggttcttcattcctgatattgagtacttgaaggatcctaaagggtttctgacctacctcggtctaaaggtttgtgctttgtgcttagtctgtcttagatctttgtttttctttgctacttagtacttacatggttgttg

SEQ ID NO: 26918 - DNA, 555 bp, Arabidopsis thaliana
gaacagctcctacggcgtaatctaatgcatcacacataatctcgaacggataatcccaattagtagctcgaacaacaggagcagatacgaaagcttccttgatggtgtgaaacgatttggggcagtcctcatcgaattcgaactcggtctccttgcacaatagtcttgttaacggcctggctattttggagaagtccttaataaatcttctgtagaaccccgcatgaccaagaaaacaacccttgtcaacctctatacccttctctgatatcttgtgacccaacattatgccttccttcaccatgaaatgacacttttcccaattgagaacaagattagtctcttcgcacctggttagtaccctaccaagattcaacaaacatgaggagaaagaggggccatagaccgaaaaatcgtccatgaagacctccaccatctcctcgattatatccgaaaatatagaggtcatacacctctgaaaggttgcaggagcattgcataaaccaaatggcattctctcataagcaaaagttccataaggacaagtgaaagtgg

SEQ ID NO: 26919 - DNA, 1414 bp, Arabidopsis thaliana
  unsure (1)..(1414): unsure at all n locations
taaactagtcaattcgtattttgtagtaaaccaatctccagatcattgctactcacatcatcatcgtcttgtacttcagcatggacggtttcgtcttccgaatggcttttgtcggctgcagcggaggtaagttcctctgcccgcttcacttgatgagaccagtccgtacggattaacgtataaagcatcattaccaaacacgtcatctgcgcagataacagtccaaaccatagcccacgaaacccaaccttaaacccaaacgtggtcgtaactgccacaggcaagcccacaatgtagaatgcgcataggttaacgcgtgctccatctttaggcctagccgtcccagtcaagactccgcaagcagccgtctgtggcgagtttccaatctcgcaaagccccaagatcggaagcgcacgcgaaataagcccgagaatctccggttcgtccgtgaacatctttccccaaaccgacctaagcgcggtcacaaaaacagcagctgctaaaccgtacgctaccgcgagtatcaagccaatcacggtcgtacattgtgcccgtgttggttggccgcctccaagagcgtgacctacacgggttgcaatggcgctgctaatagcaaacgggactacgtatagtatcccggtggtctgaatcaatattcccatggcggccacgcttgctttagggttcccaagaagcccacaaagaaaaagcatgatctcataccaccaatactccaaacacaccgagatagcgcttggtgcggctagagaaagcagcggccaccagccgggnnaaaagtgaccgcaaagcgagcccttcccacggtttgattagagaatccgagaagcacgtataaacgagcagtcccacgtcgatattcatagtgttgaaagccattgcgatgccacacccttaacgcctaaacgcatacgcacgacaaagacgtagttgaagagaggatgaagaagaatggatacaatggcagatatcgtgagcggtgatgttaagccttgcgttctaaggaacgttcgaagcggatggagcatggcctgagccaagagctcagggacgaagaagagcatataggttttggctaccttggtaatatctgggtcctgacccaaccgtaggaaaatgggttcgatgttgagccacgtaacggcgattggaacagagacgacaattaagagacagaacattttctgaaacgtgtggctaagtacggtccaacgtttggctccgaaggcttggccacagattgggtccataccaacggaaaggcctttaagtacggagactccagtgatgtttccaaagcccatagcgagtgcaccaccagcgagttcgacttttccgagatgactcaagaaccacattgagattattgatcttgagaatatgaggagtgatgtca

SEQ ID NO: 26920 - DNA, 558 bp, Arabidopsis thaliana
tgaccagcgtcctgatgtttttaggtaagttgattcagctaggcataaagcctgtgagattgattcttatcagggacttcaactttagggtacttattaacgtgttggctttttcattttcagaggaacagtacgttatgctagtgtacatgctcatcttggcagaacttgcagtcggagggatgacctggaatctcttgcttacactcttgttttccttcttcgaggccggcttccatggcaagggtaccaggttggggacactaaagttatttgttttatttcctggcaactttccttgtcaatcattaacttggtctatttgttagggagagaacaaaggtttccttgtttgcaagaagaagatggccacttccccagaaactctttgctgcttctgtccccaaccttttcgtcagtttgtcgagtatgtggtcaatttgaagtttgatgaggagcctgattatgctaaatatggtctccctttttgatggaatagtcggccaaacccagacattaggcaataaatactgagggtgcacagaaggtgatttggtg

SEQ ID NO: 26921 - DNA, 646 bp, Arabidopsis thaliana
tctgccaatgctttcttgtgacggccaggaaatggaagctgtggtttgtaaggaggagggacaaagaccttttctttgttcttgacagcaactggttttggagcagttggtgatgttgctggggaggttgctcgagtagttggtcgagtaaagtggtcgagtggcagctcgagtggcccatcttgatcttcactgtcgtcagtgactgtctttgggtcctccctagtttcaagtgcttttccactacgcagagagatagcgtgacgatattcttttgggttctgaattgctttgcatggtagtaggcttatctggtttggagctgaagaagatgcagaatgtccctctaagtatcggactttggtattcagtgttccaccttgacattgagatcattgtagctacagtgcagcttgttatgtaacttagatatcttctttgccaactccatggagccagagcgttgccgtgaagcagctgttgtccatttgtttcatgtcacctcaggagtagcaggaccttggttttgctgaggtgcaaacccaggtggtggttgcggctggtaattccctgaaattgctgcttaggagcaaaacattgattgtaaggacaaaaggtttgttctgacttgttgttgttgtggagg

SEQ ID NO: 26922 - DNA, 482 bp, Arabidopsis thaliana columbia
tcatattgttagaggtaggtactttgttgttgccacttaagcaattgctgattattgataagttgtcataacacaacgtataactccatgcatttttcctttttgttttcaagaattacactgtgacttaaagttagaaagattcagtccctcacaggatagtgacatttaaacatcgccaacccttttttggatggagcatgtgttggtttgagactgcgagtaatttccatatctcattggcatcatattaggttgtcaatcttttcagagtgtgaagttatattacaagactgttgaagatccgaaaggcgttgaaagtactactatccaatcagtgggagagagctaactgagagcatgtagtggctcgcttcagctgtataggattcacactgtatactacatacaagagacaagcaccattgtaattattctagagtgatctgctggtcagtcgtggaacttaaacgtagacatgg

SEQ ID NO: 26923 - DNA, 509 bp, Arabidopsis thaliana
tcgattctcatgtcacaacacacaagtggaaaaacttcattatgaatcaacaatttaaagccaaaacgctccctgcaaccaataccttggtacagggtcacgaatcacctagcatactgagaattctacactactctaacccatcctcagaaacctattcactactcagacatcataactgaaagcataaacgttgaacaagttgaaaacatgataacaacagtgtaacagcaggatgacaacagaatgaacaacagtaaacgaaatcaagaacagaaagctgaatagtgaatagataaagagaaatccggattacaaaaggtctagaactcaaggtctacggaaataaaactaggttaaaaacttcttgtttgcgaaaatgagaagtacatgctacttatagccaaatatcccgaaaaccctaatactcaaaacaacgaagtattgggacgggttaagaactgtactcgacccacgtggtcgagtgagaggtcgagtgaatagctgga

SEQ ID NO: 26924 - DNA, 1150 bp, Arabidopsis thaliana
tgcaattcatgtaggattcgggatctggactagatggaaaggatggttggtttacgatcttttctttttcctttcgttactatcatgcggctaacaccgtgaaagctacttatcagagagttctttattgtttttccattcagctgaagcagcatcagagaatggtggttctgccaatggtccgcaaaatggaagtgctggtacacctattctaccggtgagccagaccgtaccaatcatgccaatgacagctgcaggtgttcctggcccaccaacaaatttaaatattgggatggattactggggtgctccaacttcagctggtatccctggaatgcatgggaaagtatctacaccagttcctggagttgttgctccaggctcgcgagatggtggccattcacaaccctggttacaggtgtgcccacctttcttaggcagatttaaatcgccttttatcctcaaactcagatttgtttgtcttgcaattaggacgatagagaacttaagcgacagagacggaagcagtccaatagggagtctgctcgaagatcaaggttgcgtaaacaggtactaaacatccatttagatcacctctagcacgcccatgtgagcaaattattgacccggtggttggtgatttaggccgaatatgaggagctggcccaacgcgctgaggtgttggacgaagaaacacaaatctcagagcagaaatcaacaagctcaaaagccaatgcgaagagcttaccaccgagaacacctctctcaaggtaaaaaaaaagtaatctttcaaaattagttttagagccagccaacgaaacagttaccaactttgttcttgcaggaccaactttcattattccctccacttgaaggcataagcatggacaatgaccaccaagaaccagacaccaatcaaacaggtgccgcagagagaaaggttgattcatacaaagactcaacgtgagaagacatagagcaaaaccaattcctaacacaggtataaaaaagtagcagcagcagcaacaacaacactcggcggttctttgctaacagatggtttgtaggattttaggcatcagagatcgattggttccgaatagtttattgagggttgttggtccagtgtatgtgtgtgtaagttacgaaa

SEQ ID NO: 26925 - DNA, 586 bp, Arabidopsis thaliana columbia
agactagtgcagctgctagtctggtatactttttcttatttgatgaatttatttactgtgctcagatcatggaagtaagaattgtaaccagatctttttgtttccctatcatatagggtatgattcaactgtgggatgtggactctggactttcccaactcgacaaatatttccatagtaatgataatcctatcattgctggagcactgctgggagttgggattgtaaattgtggcattaagaacgattgtgatcctgtgagttgctgtcgtgtttgattttgctgggaccatttgtgctaatatttgcagccactcttccatcttactcagccttatttctcaggcattggcacttcttggagactatatagacaaagaggattcatctgtcagaatcggtgctatcatgggtcttggaatttcatacgcaggttcccaaaatgaccaggtacttgttatattctttcccatattactacttgaatgtttcgggtgtcacaaaactttaacacgtacactgtttcaacagattcgaaacaaattgtccccgatactgaatgatgcaaaagcgcatcttgatgtga

SEQ ID NO: 26926 - DNA, 590 bp, Arabidopsis thaliana
ggtacaacaactgctacatggacaagcatctagctccatggaaattgctaagaagttatccgaattgcaccacaagctggactgcagctacaatgacctgaatgcaaaagtggaggcgttgaattctaaagtcagatacttagaaggacaatccgcatctacctctgctcccaaagttacgggacttccagggaagtcaattcagaatcccaaggagtatgctaatgttcatgctatcaacataaggagtggaagtgagttgtccactgttagtcactgaggacagtgcataccaagatggggaggatttcagtctcaataaagatcaaactgacaaacaactcgagcagccactcgaccagtcactcgagcagtcactcgaccagtcactcgagcagccactcgacctgtcactggagcttccactcgaccacttcactcgaccgaccttcccagcaacatcaccaactgctccgaaacatgttgctgtcaaaaacaaagaaaaagtcttcattcctcatccttacaagccccacttccatttcctggtcgacataagaaagagttagaagataagtacagagctatgt

SEQ ID NO: 26927 - DNA, 585 bp, Arabidopsis thaliana columbia
cctgaatcttgtactggtagatgaagaggatcgccgatacttcaagcagcaagaaatcacgttgtataggttgaaggaagacgcatcatcttgatgataataactactgtaaggattctcattatccttttgagactttttttgtaaaaagctttagactttgtgtactcagattgttatttgggtcggtacttagaatgaagttttaacagtacttgtttagtttgttcatcaatcaagttccttttctctggattccggtcgagtttgctggatttcatggtaaagtctgaagttttacaaacctcaaaacactctctgaaaagccaaatctctaaatgcaactaactgaaatggacagatatacaaaactggacaactctagagtaaagaagttggttagtcttcttcaattgtttcaacaggaagaccttccttgccccatgtgtagattccacttctaggtgaaatacgttcttatagccgttaaggaccagaagataagcagctatgagagacctgcaagaaccctaattatatgagcaccgaaacaaatgctttcttcgcacaaagttgtagactttt

SEQ ID NO: 26928 - DNA, 509 bp, Arabidopsis thaliana columbia
ccgttctacaagacagaaaacgtgtttggcaagaagtgtttcaccaccagggctaagttttacgataggaaaaaagaacacgagatcatcgtggaaagctcgacctccgggcctaaagagccagagatgtggattagcatagatgggattgtgttgatacaagtcaagaatttgcaatggaaattcagagggaatcagacagtgttggtagataaacaacctgttcaagtgttttgggacgtgtatgattggctgttcagcatgcctggcacaggccatggtttgctcatattcaaaccaggcaccaccgaagacagcgacatggaaggcagtggtcacggtggtggtggtggtggtgagagcgatacaagtacagggagcaggtattattcgaccaagagtagtaacccttggccgccagacttttgcctttctcttcatgcatacaaacttgagtagtagttcttggaaacaattaagaagcttttgtctattcacttattgttgtg

SEQ ID NO: 26929 - DNA, 435 bp, Arabidopsis thaliana
ttactgtatgaagatgtgaatggacccataaaatcaatcccccatacatcaaagatctcaacttccaagattagattctgaggcatctcatttcttctgctgatgttgtcttttctctggcatgaatcacactttgaaacaaactcatgagcgtctttaaacattattggccaccaaaagcctgcttgaaggatctttaacactgtcttgaacgtcgcgaagtgaccaccatatgcagagccatatcttgtaaatcttatctttatagagagtgtaaatataaggctcatccctctagtaatggtggatgtctctgaaaaacttcttcctttcataactggtcaggttgggaggctctactctgcgtgccaagtaattgacgtgatcaacataccatggagatcctcattcaacagtgttcagttggtggaactc

SEQ ID NO: 26930 - DNA, 601 bp, Arabidopsis thaliana
cgctggttgcatctgttgcaaagaaagagtcataaccttcagtgtaaatttctgattgaggcgagattggcttcttttgaaagctacttttcggggcatttcggggaattttggagtctttgtaaacttctttggagctctccacattgttgacttgtcttgtagaaaaagctcaaaatgttagctgttgacaagttgagctaggaaagctgctaggcgacttgttgaagaactccaagctgttgacgagctgttaggcgggcaatagcaagctaggaaggctgccggcgagctgttagctgggcgaacgacgagccagagaaactgcagacgaactgtgagctaggaaaagtacagactaggtgctagctagacgaactgcgagctaggaagctacagacgaacagggagccaggaaagctgcagacgagctgttagctaggcgaagtgcagacgagctgctagctagacgaactgcggctaggaaagctacagacgaactgggagctagaaaggctgcagacgagctgttagctaggcgaaatgcagacgagctgctagctagacgaactgcggctaggaaagctacagacgaactggg

SEQ ID NO: 26931 - DNA, 599 bp, Arabidopsis thaliana columbia
gtgagtgattgatcagcgaggtggactggacatcgatgtcagaactgcccggattggagagtcgggtgggccagaggacgaagcccagaaagttcggaatcaattcaaatttgaacattcgaatagttaatatagaataattgtgtgtaaatgggaattaaatgtattctttgagtataaattgtgggtcaaaggccatgtagagacacacacatttttgtgcaaacttactatacacattttcttacaaaactcatagttttctctataagcatcaatctattttctagtacatttgtcctcaagaataatccttctcactaaataaataaatacttgagtgtgtgaatccgacatccacattttggcgccgtctgtggggacaaagaattcttgagtcatcagattttttctatacacgacatttccgaagtgagcgacaatgtatggagaagatgctaccaacgcttcactagccgaaactctcaagaccatgcagcaaactatggcggaaatggcgcagaagttttcgaatgtggaaagaaccgtcaaaatactgcaaacaacccagatatcactcagtcaaaatgttattacta

SEQ ID NO: 26932 - DNA, 529 bp, Arabidopsis thaliana
gtgtgctttaaagggataacagggaggtactatggctttattgccggataaagaaaagttgctgcgtaattttttacgctgcgccaactgggaagagaaatatctctacattattgagctgggccagcgtctgccagaattacgcgacgaagacagaagtccacaaaatagcattcagggctgtcagagtcaggtgtggattgtcatgcgccagaatgcccagggaattattgaattacagggcgacacgtatgcggcgtattgtgaaagggcttattgcggtcgtctttattctctacgatcagatgacgccgcaggatattgtcaatttcgatgtgcgtccgtggtttgaaaaaatggcgctcacccaacatctcaccccatctcgttcacaaggtctggaagcgatgattcgcgcaattcgcgccaaagccgctgcacttagctaaactaaaaggacagctttcatccggttggctcacattgccggatggtcaatgttacactgacctgcacaggagtgttttgg

SEQ ID NO: 26933 - DNA, 861 bp, Arabidopsis thaliana
agaagtatgtcaagtatcagcctgaagatatcgaggatctcatcgaccagctctttgaaggcaacacctcctcctcttctactgccaccgccaggcgaagaacatagcttctttcttttcttcttttttcttttgcaacaacactttttcctgattttctcaaaatttttcatgtcttcttcaactgtttttgtctgaatgccacaacttggatgacccatatttctacgaattcaaacaaacgatcgtggctccatgccatgtgtaaatgttaattataatcagttccagcatttatcaataaacaatcaatttattttgttgatagcctaacggtacgtttactaagttatgtgaatttgatgcaagactaactcaccttttattaagttaattggcggctggaacgaaaacataagagactctatccattaaacatacttctaccttatttaggcatcaaatctgtttatgcgagaatgagaagatggaagctctaagtggatcaacacggtcctaatctccatcgggtaaagctccatctccagctttcttggatcaatttctctccctctctttgccttcttctcctctccataagatccttcaccttctactttccacaccaacctcttcttctccatcgtgcttctttcttgatttgctgataggctcatctccgtcaatttcccgatctgcaatgcaagtattttcatcatttttcaccacaaaatttgctatctttccaaaaaagcttataccttctttccaggaaaaagctttttgagttccacgcttgctactcctgatagttccttgtcctcttccacctaattgaacaacctcaaatgcttcatttta

SEQ ID NO: 26934 - DNA, 468 bp, Arabidopsis thaliana columbia
gatgcgtctttctgcaggtaattatttgtctttttttttgtttttttccctatttatgtgactgatattatcgtgctgctgatcattttcccccattccagtcaactgagggatgactgtctgtctgcaaccactgcttcttgcgcactcattgagtcatttgtgctaatgtcatgcccgtctattggctctgatggcttgtcttccttgaacgggctcccaaatttgactgttcttgatttatcgtacactttcttgatgaatttggaacccgtcttcaagtcctgtattcaacttaaggtaattaaggcattaagacttgtatgatgctggatgtttccctttccgtcagcagtagagcatatacattatcttgccaatgaaaacttcttgagttatgttgttgtgggcattctttgtatataagctattcatgattcatattgccttagggcttacttttgagac

SEQ ID NO: 26935 - DNA, 424 bp, Arabidopsis thaliana
  unsure (1)..(424): unsure at all n locations
tcgttataagctaattgtagttaaatataaatcttgacgattaatatatatatatataagtatatatatatatcctacttactaaaaaaaaattattcaaaatttcgatcatgattaatcggctttctcaaagtttcgatcataattgatcggttttctcgcaaaaagagggggncggtcggcgacgggtttatagctcgtgggatcgcgtttcgagacacggcgggtgcgagcaacgagcgagcggtagtcgtgagatgcgggtcggatctgtcagttttttaccaatgcagtttcgaagcttaccaagacactctctgcgttcactccaaccgtcagttttaccgcgattgcgacgtttatggaactgtcgattttatcttcggaagcgcagccgcggttctccagaactgcgacattttcg

SEQ ID NO: 26936 - DNA, 578 bp, Arabidopsis thaliana
  unsure (1)..(578): unsure at all n locations
nnnnnnnnnnnnnnnnnnnnctaaaggccgcctgagccacttcacgcaggttatgcggtggaatatcggtcgccatgccgacggcaataccggtggtgccgttaagcaaaatgtttggcagacgggcaggtagcattttcggctcctgcaaagtgccgtcgaagtttggcacccagtcagccgtcccctgccccagctcgctcaatagcagctcggaatatttcgacaaccgggattcggtgtaacgcattgccgcgaacgatttcggatcgtccggcgcgccccagttcccctgaccatcaaccagcggataacggtaagagaacggttgcgccatcaggaccatcgcttcataacaggcgctatcgccgtgcggagtggtatttacccagtacgtcaccgacggtacgggccgattttttaaatttggcgctggcattcaggcccagttcagacatcgcatacacaatgcggcgctgaacaggtttcagaccatcaccaataaacggcaacgcacggtccatgatcacgtacatggagtagtttaagtaggcgttttccgtaaattcatgtagcgc

SEQ ID NO: 26937 - DNA, 444 bp, Arabidopsis thaliana columbia
ctagaattcatcagtactatcatttcccttcctcctgctttatcaaagttcttcttgacgaaactcggatctctgaataaagcataccatcgtttgcaagtagtcttccattttgctagggacttcgccggaaccctagagagtatttccgattccaaatcgtgtggaagatcggaaatcatcattttctttctcattgtttttgatatgatagctggaggaagaatggaagatagcgtagaagagtgtatagaaattagggttttacttacaataagcccttactattcattgaaaagctcactaaacttgtttatgaaaagcccactggttattgtatacaagtccattagcttcacagatgtgtttcagttgaagcctctctttgtttttgcgagtcggtttccgcaaaaagcaatcgcttgcctcgttgtttgtgtacac

SEQ ID NO: 26938 - DNA, 540 bp, Arabidopsis thaliana
  unsure (1)..(540): unsure at all n locations
nnnnnnnnnnnnnnnnnnnctaaagaagcaccgcgtagangccctcttgctgtaagcgagccagctcttgacgaacggcatccacaccttgttcgaaaacatgtgccgaaacgacgccgcagcgccctgtggattgcgcttcaaccagacggggaagatagctgtcggtcatgggatttaccgggtgatggcgcatcccggattcggccagcagttgattcattacgaacaaatacccctgataaaccgtacgtccgttgaccggcagggccgagagaagaccgtaaacggcgtgtcgagagcatccattaaggcatcggtaaccgggccaatattacctttcgccgtactgtcgaaagtagagcagtatttgaaatagatctgtttgcaaccttgctgttgcaaccagctcagagccgccagcgattgctgtgtggcttcaaccactggacaggagcgcgttttcaggctgatcaccagtgcgtcgattgcttccggcattttacctgttggaacaccgttaatttgtaccgttggtag

SEQ ID NO: 26939 - DNA, 610 bp, Arabidopsis thaliana
  unsure (1)..(610): unsure at all n locations
nnnnnnnnnnnnnnnnnnnnttaaagatccgtcacagttcaaacatacaaaatttgtgattttacttaactattgtgtaactttcataaaacaatgtgattcgtgtttttaattaattcacgaaaactggaatcgtaaaggtgatgacgtgacccaagaagaacgctttgagcaacggatagcccaggaaacggctatcgagccacaggactggatgcccgatgcttaccgaaagacattgatccgccagattgggcagcatgcgcactccgagattgttggtatgttgcctgaaggtaactggatcactcgcgcaccaaccttgcggcgtaaagcattctgttggccaaagtgcaggatgaagccggtcatggtctgtatctctatagcgccgccgaaacactgggctgcgcagagaagacatctaccaaaaaatgctcgacggacggatgaaatattcctccatctttaattatccgacattgagttgggctgatataggtgttatcggctggctggtggatggcgcacgatcgtcaatcaggtggcgttatgcgcacttcttatggcccgtatgccagacaatggtgaaaatctcaaagaagagagt

SEQ ID NO: 26940 - DNA, 703 bp, Arabidopsis thaliana
cccttttatattatgagataacatgcatgcccatttacttactatcctgttctagtttggagatgctctgtggtcctgatggtgagcttcccgagaagttgagaaatttggaacctcgtcttatagagcatgtcagcaacgagattatggatcgagaccccaatgtccgctgggatgatattggtacagtaagatgtttcagtgcagtgtatattattatccctgttgcacctggagtttctcatcataagttattgatgtgcagctggtctggagcatgctaaaaagtgtgtaactgagatggtcatttggccattgttgcgtcctgacattttcaaaggttgtcgttcacctggaaaaggacttcttctctttggcccaccagtaggtacccttgtccattttgatatttaagatgaaatgacactcgtgtctgttttttcttagatctgtatctactgcataccagggaactggtaaaacaatgattggaaaagctatagctggagaagcgaaagcaacctttttctatatatcagccagttcattgacaagcaagtgggttagttccacttctttgcttactttcacatggatattcgtaaaattacgacagtaattatgttccactatgtcagaacttctacatagcagggaaacccgtaccattttctgtatgtcagtgattttgttccttctcaag

SEQ ID NO: 26941 - DNA, 565 bp, Arabidopsis thaliana
tatcaatcaatatgttatcctagatattcacagttctctccggatatgttgagatgataaaactcactacttagttcaggttgcttacttttaatgatcttgtttctcgtcagtgcctagggaagattcataatatgaccataatggttaacatgatctctgtgaaactaatctgataattgttgctatcatctccttatgcagtgtgatcccgaggaggcagattcctgcgactctggttgcaatggtgggctaatgaacagcgcttttgaatacaccctcaaaaccggagggctcatgaaagaagaagactatccttacaccggaaaggacggcaagacctgcaagctagacaagtccaagatcgttgcctctgtctccaacttcagtgttatctccattgatgaagaacagattgctgcaaaccttgtcaagaacggacctcttgctgtagccatcaacgctggctatatgcagacttacattggaggagtctcatgccttacatatgcaccaggaggctcaacacggtgtcttattggttggctatggagcggcaggttac

SEQ ID NO: 26942 - DNA, 566 bp, Arabidopsis thaliana
gtcttattccaaactgttgggttcggaagcgacgcagcccttctctctgcggttatcaccggatcgatcaatgttctcgccacgttcgttgggatttacctcgttgacagaaccggcaggaggttccttcttctccaatcttccgttcacatgctcatctgccaggttctaattaaatctctcatctctttgtttcttatgcctcaagtaacttaaaggtaggtttcttgtcccagaagtaaactaactaacctcttaaaacagttgatcattggaatcatcctagcaaaggacttgggcgtaacgggaacactcgggaggccacaagccctagtagtggtgatctttgtgtgcgtttacgtgatgggatttgcatggtcatggggacctttgggatggctaattcctagcgagacgtttcctctagaaacacgtagcgcaggattcgctgttgcagtctcatgcaacatgttcttcacttttgtaatcgctcaagccttcctatcgatgctttgcgggatgagatctggaatattcttctcttcagcggttggatcattgtgatg

SEQ ID NO: 26943 - DNA, 578 bp, Arabidopsis thaliana columbia
cattgagctctacttccaagcttgccttaagtttcttcacggtgcttttcttttggagatgagtagcaacgagagtgctagacaaggagaaacaatggtccaatctatgaagatttatagtagcactgcgaatctttgcgggtaatttacatttgtgaggataaaggaaaaacgtcgttcattccttcttttccatttgtaagcactgaaacctttttccgtgatagattttgtgcccatgagtatgagaagtctaaagatatgggagctgctgccctggcttacaaatgcatggaggtcgcgtatatgagagtggttaattcctcctacaccagtgctaatagatatcgaaatgaattgcagacttctctacaaatggttccgccaggtaagctagtcgaagatagccaaattccttattggccatgtctttgagtctttcccgttgtaatggtcttgtcactgccttttaggtgaatctccttcttcatctgcctcggatgttgataacgtgaaccatccagcagcagtagacagagttggtactcaaggggcatcagtctcctttagttgctggg

SEQ ID NO: 26944 - DNA, 549 bp, Arabidopsis thaliana columbia
gtaagtaaggtttatctctcgtttgcatcatacaaacaccaccggcaaagcacaaacgtaaacagaagaatattgaactaccagacaaaaaaagatgaaagatgagacagcagaaacatcaacctgaacagaactgaattttccgcaaggtggccatgtccgagtaagatcactaacataaccatgtaactcacaacccatgtccatcaagacaagatcaccatctttaatctgcagataattataaaaagaagatactggtttcaggaacatctctgtactagcaatcaaatagggttttgtcaaacttacacgctgatcatttcgtgaatagtgaataacactggcatttgaaccaccaccgactacaggattgaacctgaggaataaatcatgtcatttttcttgtcactagaataagaatactaggaaatacttattgtaatagaccctgaatcacatatttattcatggaataattgtcgagacttacgccattcgctgagcactcttacctgggactcatattcaacctgggctgataagatg

SEQ ID NO: 26945 - DNA, 514 bp, Arabidopsis thaliana columbia
gtgtttttcttttctaatgtgtgaaaaaaggtagaataaaactaacccaaatgtcaaacgaagattcataatggagccatttgcgagttttagaggaacctcatcagttacaagtgcaccaatagatgatgcatgatcggagtatccgatttcatagtcacattgatcctcagggtcagcacaaggtctgtcctggggaaggtcaagaccagaacacaagatgtgtgaacaaggcaaagtgttgtgattgggcttgtactgcttagcacgaggctgcaaagaaagagaaagaaattctaagatagaacctttgcttattatgtcacacactaaaaagcatatcaacgcttacctttgtgcaactgttgcaaggtgcatcacactgaacccaagtgaggtcactgccagtgtcaatgtccaagtcagagagcttaggtgggttgcaatgttaagcacacataatagtacctgcaaagatgaattcgttaattacttcaacaatcaaattgggcgt

SEQ ID NO: 26946 - DNA, 569 bp, Arabidopsis thaliana columbia
ctgaaaacatatcttcctctttttcagaatggttgttgtgattcttagacatgtgaggttgttcttcacatgtgtcattgtttctagcaaatcggccgcgaacacgaacacgcctgtcggctagggttttacgacacacatactgcatacacacataatcatttgaagacattcaaaaatgaatatgtaattaactaaactaaataagaatgagtgtagtatgtatatgtatacgtaccttgatggtcttattgaagttgcgttggttcttcttcttcaagtacctcatgattctgtctttacgttcctccaccgaatagcgtcccacttttgtatttggctcagcttgtatccctccttcactatttccctgcttcacacaaaatatttattttatttcgtttcttgcatgcgtatatattaaatgtctctcatattaactataagattttcaaacgtgaatatatacgtacccaagattgctctcctgtggccggacggaacaagggcttgatctccggtgaaaagccgtagtattcttgatgatctccacatgaaagtaatgtgtg

SEQ ID NO: 26947 - DNA, 473 bp, Arabidopsis thaliana columbia
caaaccacacttctcaaaggactggtaaccacttctttcccttcctgcccaaaaacagaaaaacacaaaacagaatattgtctgactctcaacggacatataaaactggatcttgtctaggtcaaacattacctcaaaatcagtcttcttctcaatgtatcaacaatactagtatcaactatacatacaaacatgaacatatgttctaacataactacataagacagaccacaaagctcaaacatgaatcacttcctacgaatcttcactaaacaaaagctagaagtgtaatcaactactaaattcaaatttcgctctttctttatcacaacggtttttcttcttctttctcaaagcggttcagaggaggttggagaaaaaattttggaggttacctgtgactgtgagcaacgaatgggacaatgagaactacgagaagacggagaaaagagagatggtttctgagacatgtt

SEQ ID NO: 26948 - DNA, 496 bp, Arabidopsis thaliana columbia
caaaagagttaaaatatacatgaatatattgattctaatggtatcttacattaacaaagcagtcgtggaaatgaagacgaaggatgcttgcagcgatgcgacgggtccgatcttagagcattgacaatggtagtggttgcaatgtcaaagacttgcggacatgttttatcgtaaaaggaagggcttagttgagcatgagacaatgatacctgaataagaagaagaagaaatcccaattttatcaaagaggaatgcattttcttagctcttttaagagaattatttggttatggtttaatttgagtgaatgtaggtttgtcttaacgattctttttataggccaaggttctagcttggcggcttttacttttgtggattatttgacatacttttattcaagttgtgtatccgtgaatagtatattacatatggaatgttatactttgaataagacattgttattcgttgaatgactctgtacaaagtggtttaaaag

SEQ ID NO: 26949 - DNA, 584 bp, Arabidopsis thaliana columbia
  unsure (1)..(584): unsure at all n locations
ccaggatttattggtggtcacggtattgcctttgttttatctgcttccatggatctcacacaggcagatgcaacacagttcttgggactttttaacatctcgactcaaggatccccttcttctcatctagttgctgttgagctagacactgccctcagcgctgagtttgatgacattgatgccaatcatgtaggaattgatgtcaacagccttatgtctatcgcatctactccggctgcttacttttccgagatagatggggagaacaaaagcataaagcttttgagtggagatcctattcaagtttgggtggactatggagggaatgtacttaatgttacgctggcccctcttaaaattcagaagccaagccggcctcttttgtcaagatccatcaacctttcagaaacatttccagatagaaagttctttcttgggttctctggagcaacagggacattgatcagctaccaatacatactcgggtggagtttaagcagaaacaaggtgtcattgcagacccttgatgtcacgtaacttcgtcgagttctcgtcatagagntaaaaataagggccatcagtgg

SEQ ID NO: 26950 - DNA, 579 bp, Arabidopsis thaliana columbia
ttgtaagcagataaacacttttttaactaggctgtaaaagtgttgatgtaactttttacaggaaagattctccggatctttggagaatcgaaacaacggcgaagagacagctaagatagtggaggtagatacagggacccgacccgggacttacagaatccgagcacccgttttatccgggtcggatttcttagacaacccgtttcgacgtacgctttcttcaccgctctcgggtcgagtcccaccgcgtctatcaatgcctaaacctgaatgggaagagtgcagtagcaagttcccgacggcgcagagcacacctcgtttttctggtgggtctccggcgaggagcgtgtgctgctctggtggcggagtagaggcggaggtggatacagaggctgatgctaaccggttctgtttcttgtcgggggaatttaactcgggttacatggcggatacaacgtcgtttagggcgaaactgaggtcgcatagtgcaccgagacagagaccagagagtaatgcttcagctggcggatggaggaggagtatcggcggcggtggtgttaggatgcagagacagtcgtg

SEQ ID NO: 26951 - DNA, 571 bp, Arabidopsis thaliana columbia
  unsure (1)..(571): unsure at all n locations
tctgccacacaccacacctcaccactcctatgccaatcccaatcccatatgtagccaacacatatcccccctcactctcccctcgtttgactctcaactcaccagacgccaccgcccaacaccctgcaaatcctctgacgtcatgaatcctgcattcgtcatacaagtcgtgtgcgcgtctcactcgattaacccaccaagaatattggtcactctccattgctttccagtcataaagagggcttcacatcaaagactaggatatgcaacacttgtgaagtacaacacattgtttagggaaagtcagacacacattcacgttgaatatgctacagtaacactaaatatattgcttacgtcgagacaaattataactaaaaacaaacagtccgtttctgtaactatttaagtgaaaaggtaaanaaaacatattatgagtaaagtaagttagcagagtgagtagcataatacctgtacacagttgacgagtttcactgaacaagtcaggaggaatagcgctaaaagaagaggaaaggctttgttgttgtgtgtaaagcaacacaaaaaaaga

SEQ ID NO: 26952 - DNA, 647 bp, Arabidopsis thaliana
ccccatattgaactgcccaactctcacactgctcttttggggctcttcaacaagttgccgaactgcagtagtaagccaaactgcaatagatcgcttatcaacaaactgtagctgcttcaaagagtttccaacagataccatatccacaggggtggaagttctaaacacatcaaccaccttctgattttctccttccactccagggccatgatgaggacagcttactttattatcacaaacatgactcgttgaagcgccctggctaccttcaattctagcagcttgtagttgagccagcgactgtgtcttacgcgccatcttctgcctacctcgtggtacttgtttagttatctctatctgaggatcaaccttcagagaagactccacagttttcgatcctttcttgatccaccagttatcttcttcatctgatgcaattggtgaattcccttgatagcaagagctcttttcatcattcatttttggtctttttgctcttctacagtcttcacaccctggtgtagcttctggttgatcatcttgctatacacagatccagttgatctcttaacactattttggaattcatccgcactggggtttcacaccacatgacatacctggaaactgcagtagagctgatatgc

SEQ ID NO: 26953 - DNA, 519 bp, Arabidopsis thaliana
ttcggcacacatactcgatcgttcaccacgattgtaccattgttcgaggtttggtactcggtcttgttgtttagtgcccatccttttatctcctcgtcccgttcctgagccagccggatcctactaagcaagtcggcctgaccgtcccgttccgcctcaacttccgagcgcctcctactcagggcgtcggtgacttggttggcattgcacggatggtacgctatatccaagtcgtaatccgccacaagttccatccaccttctttgccttagattcaactccggctgagtgaatatgtactttaggattttgtggtcagtatagatttgaactttagcaccagtacaagtatgatcgccaaatcttcaaggcaaatactaccgcggccatttccaaatcatgcgtagggtaattcttctcatgttttcgcaattgccttgatgcgtatgcgataacactccccttttgcatcagtacgcatcctagtcccactatggatgcgtccgtataaaccgtata

SEQ ID NO: 26954 - DNA, 246 bp, Arabidopsis thaliana columbia
tggaagagactgtgtgggattacaaggaaagactggtctgcaaagctagatgatgcattatgggcttacaggacagccttcaagacccccattggtacaactcctttcaatcttctctatggaaaatcatgtcacctacctgttgagctcgagtacaactgctgaggataagcgattgatccaactcagtaacctcgatgagatccctctagaagcttatgagagctctaaaatctacaaggagag

SEQ ID NO: 26955 - DNA, 557 bp, Arabidopsis thaliana columbia
gagtcggatgctcgagtgacaagtcaagtgatgggttgatggatcacgtgtcagcacgtgacttgccagctcaccgtgcgttagttagtgagggcttaaaataacaaatccacataagtgtcgggagagtgaactgtgagaccgatgagccgagcacagtacgcgtagtaaatggcagctgaatgagcaaagttctctaccaaatcctagccatctacaacatccgaggtctggaaatttccatcgctggcggtatccagaagcattctgatgcgtggtaggactcctctataaagagtgctgagcagagaggctttagtaaagccatgatgagggcattggttggtgtaatccttgaaacgctcccatgcttcacagaagctttcagcagtcttctgtgagaaccagagatctcatttctgagtcttgcagttctggcattggagaagaactttgatagaaaagccttcttgcaatcatcccaggtggtgattgaatcatggggcagattcttctcccagatgtgtgctttgtcgcaaaggagaatgggaacagac

SEQ ID NO: 26956 - DNA, 476 bp, Arabidopsis thaliana
cagcgttatggacagcatcaaccctggttccgagagggagatccgttgggaggtgccggtccgtaacgtcatcgtttgggatctgaactgtaagccagatcccgataaattggatgaattgggatccatgatcattggtcacaattgatgtgttagtttcggtgttggaatgatctatttccgtccccacagacggcgccaaatgtgggttctgaaatccacactagagatttgtaattgagattatgagagttatattgctaagaacgaatggactttttgtattgataatgacaaagcttttacaatgtgaaaggagattacaagtgtaaaagtatgtgtgtgaatgtaagctgaattgaatgtgtcttccaagtcgtccttgctcccttatataggtctacgcacgtggtagctccgtccgggatctgcggaggtcctcctggatattcggcaggttagttccgaatatcagg

SEQ ID NO: 26957 - DNA, 630 bp, Arabidopsis thaliana columbia
  unsure (1)..(630): unsure at all n locations
caccccttgattgcacttttatttacctgttatttgtgtcacatgttgattgcattttagttcttaaatttgttgcatgttggttctactcgacccaatgatcgagtacggcttttaagttcttatttttgcttgtttgaatcctgacctaggattgttactagaaaccaaccatctctataatctgggttgacttagttgcttctgtacacatcttgattgctagcaatatacagtggattggattaacaccccctatagctgcatcgacaagttagtgtttaaggggaattgaactgaacacaccacacttcagcacataagtaggcctaaaaaacctactaatcaatttggtgtcgttgccaattcattgttacattgttacattcaagatatcagaaaaagttaagatcaagttcttttacatttctcaagttactaactcagtccaaaggttctgcacacctactacctttcaaagacagaattgacagaatagctcgtgagttacaagaaacaaagctaaggcagcctgtgatcggcaaagaccagctgctatagatcgacagacaggccagttgatgtcaagaccaccatgtagtgaacacgaagaaatattnggtgttgtga

SEQ ID NO: 26958 - DNA, 643 bp, Arabidopsis thaliana
tcactgcgcttatcgatacttttgttaaagagggtaaccttttagaggctagatacttgtacaaggagatgatccgaagacctgtagttcctaatcttttcacttacaattcactcatcaatgggttttgcattcatggttgcttaggtgatgccaaatatatgtttgatctgatggtaagcaagggttgcttccctgatgttgtgacctataacactctcataacaggattctgtacgtctaagagcgtagaagatgggatgaaactcttttgtgagatgacttatcaaggattggttggcgatgcattcacttacaacacgcttatccacggttattgtcaagcgggcaaacttaatgttgcacaaaaggttttcaatatgatggctgattgtgatgtgactcctgatattgttacctacaacatcttgcttaggtaggcaatgtattaacgggatgatggagaatgcaatagtgatgatagagcatctgcacaatagtgacatggatatcgacatcatcacgcatattaccatcagtcaatggtcgtgtagcactgataagctgaaagatgcttggtgttaatatcgtagcctcactcgcaaaggagtggagcccgatgctgtcgcatacatgaccatga

SEQ ID NO: 26959 - DNA, 299 bp, Arabidopsis thaliana columbia
agctactcagagttgcgtaaaggacttctcaaactgaaaaacccaagcaaacaactcatcaatctaaaagtaaccaagatccattggaactgacctgaatgtcgaacattgcatcggggctgacagtatatccagttctttccttgataagtgatacaaccttcaacttgttcttcttctttgctgccctccactcagattggagatcttcattatctgcaaactggagaaagaccaaacaatgataaccaatgtcgcccaataaagataacagcatgtgaaacaacattgaatctgat

SEQ ID NO: 26960 - DNA, 242 bp, Arabidopsis thaliana columbia
  unsure (1)..(242): unsure at all n locations
ctnnnnnnnnnnnnnnnnnnnnnnnctaaaggatgccgaaccagatcgaagagcaacaagaagaagttgaagaagcgaaattctgaaaagatccacatcgagtcagaagacctggagcccgtcatccagcaagtatacttagatcaagacctacgtggacagctaagcgtgtgcaggcaaaagcagtcgcagcagaagcatgaggactaggcaatggaagctcaggctctggattaatagaa

SEQ ID NO: 26961 - DNA, 548 bp, Arabidopsis thaliana columbia
agtcctaagagagggacatgcagtatatcaggaagtagattgtatatgggattcgatcctggatttgtttggcagaaaataaacttaagtgttaaatttgattcaaaggtggaagttgctatgtcatgtaaagcagctattgcaactgacctttcttagacagttcatggaaaaatagttttgcgagactagagatcctctccacatcatcttctatacatatagccatttcatatatataacctttcacctgaaatcaggattcacaaaatgaaacctccaactataattgcagatatttaaagagagcaaggagagaggtaaggagtccaaccttcatcatatcattcaatataagatgtgagaggaccaggacagcatttttcctgacagaaactgaagcatcccgtaacctggcatacatattttctgtccaaggttctaaaagatttggaaaacgaacagccaagtctccaagggaaagggtgcaattcgatcgtacaacttcagacggtgcattttcaacaactgtgaagagaagctgaaga

SEQ ID NO: 26962 - DNA, 503 bp, Arabidopsis thaliana
gaaatattgtgcttcccactaagcgcttgttttgagtcaatagcttgacttggtggagttcaggatgtgggtggagtggtggaggattgctgctgcctcctcgccttctaaggcggtgcgtaaacggatctggttggagcagctacaagaacaataggagaaacaagctttcgaggaactctaggcttgttatcttgtgaagcaaacttcaaagaatctaaggaattaatcgaaggtaaagaacgagaagagagagaagagaacttatcacgtaggtcctcaagtggtgtgggctgatgagaatgtgcagaagcatctgtctgtgaaacccgagggtgtcaattgacaggggtagtggtgtcgattgacaccgttgctctgcaactctcattggcgagctgagcaaaagggagcgttgtgtgtggcgctgtggtgggattctgagcagtctgaggaggtgtgtctgtgctggaacaatgccactgataggcttaataagctct

SEQ ID NO: 26963 - DNA, 511 bp, Arabidopsis thaliana columbia
cgcgccttttatattaatctttgacatcttctgctatctctccttcttccttggagaaaacatgtttgtttccgataacaacaatccttcacgggacataaacatgatgatcggcgatgttacatcaaacggagatctacagccacaccagatcatcctcggagaaagcagtggaggagaggatcatgagatcatcaaagcaccaaagaaacgagcagagacatgggcacaagacgagactcgaaccttaatctcattacggagagaaatggacaatcttttcaacacttccaaatctaacaaacatctctgggaacagatttctaagaaaatgagagagaaagggtttgatcgatcaccatctatgtgtacggacaagtggaggaacatattgaaagagtttaagaaagctaagcaacatgaagataaagcaacaagtggaggatcaacgaagatgtcttattacaatgagattgaagatattttcagagaaagaaagaagacagtggca

SEQ ID NO: 26964 - DNA, 500 bp, Arabidopsis thaliana
ggcacctttttcagaggagtcgattggagatactagatagatctagatgcagcgagcaatggtaatttcaacacgagatatccagctgatgttacagctctaatagagaaccttgcttgtagtaaaggcaccaagaatgctgattttgagaggaaaaagattgctggagctgtttcaggcaatcagatggcagaggtgaatgctaagttggattcggttcataacttgcttacaaggaagaagcatgtccattttgcagctgaggatgagactattgagcctgagactaagtctgaagaagttgagctctcacttgaagaaggtcaatgtacaggtagctcaaactgcacaatccatcaagagacaagagggctttcttcctggtaatcctgatgctaacctaaggaagaactgtaatgcaatcttgatcagagaaggagatgatgtgtgggaagaattagacactgaggacgagttggagctcgcagtcgtagagatgg

SEQ ID NO: 26965 - DNA, 548 bp, Arabidopsis thaliana columbia
ttccctttccgttatatcttattattttatattaatttttatttttctttccactttttttaataccaagttgttatttctttgtactgcttcaaattttcgatgataaataatatcacatgtagggaacggttcaacagtcagtacttggatcgacccttggttgccaactcaccctccaagaccaccgaaaccaaagaataaccaagtggaacactgtcttctcaacaattggattcttcatggaaatcaatggaacagagacttagttcgcgatctagttacagaagaagatgcggaaatcattttgtctctcaagttatgtacagcggctactcaagactttctaggctggcattacactgaagatgggatctattcagtcaagtcggcttactggttagcaaaccaagtgttcatggatccagaaattcaaccacccccaaggaaaagcagagattaaagctaagatatggaaactcaaaacggcgccaaaaatcaaacaccgtcctctggaagctactctcaggagccttaccacaggagac

SEQ ID NO: 26966 - DNA, 538 bp, Arabidopsis thaliana columbia
catatgtcgctacaaagcttacgtgtcgcttctattaaaattagcgtcaattgttcggatttatttattttattcgaccgctttattttattctatttacaaatcagccccgtaactatttttttttcctctctctatagctttacacagtgagcactgtagtattggtgatccagactatttactacgattacatctacaaactttgtagacatagacgtaccaagatttgtcaaaaggtaataattataagagttgattacatttttaggtgttgattatcataatgagggttttttttttttgttaaggatgaggaagatgaagagaagagaccattgaaaccaccaaagacgatgggatctgctatttccatcccaggaggatcttacaaagattcttctcggagagagttctattacacgtacggattattaaacataaatcatattttatttactctaatttgtctacaaataagttaaagtttgtgacaaaagcttcgtatattttattattatatgcttcccctgcatac

SEQ ID NO: 26967 - DNA, 549 bp, Arabidopsis thaliana
atgaagttgaacgggtccgaggatttgtcgaccaggagtggaaatcaatatgaagctgaagttctctactattaaagatgaaacacttctaagagaaaagaaggggaagggagtagagactggaactagttctggaattcttatgaagcctgatgaggtacctaaagagatgcgtctagctacactagatatttttgctggatgtggtggtctatctcatggactagaaaaggctggtatgtatttatattctcatgtcatgcatatacttttatcttctaaacacttatgcatgttttgggtataacaaggtgtatctaatacaaagtgggcgatcgagtatgaagagccagctggtcatgcgtttaaacaaaaccatcccgaagcaacggtttttgttgacaactgcaatgtcattcttaggtaaatagccaacaaagaaatttttattactcttccatttagggcatttctcttgttggtttcagttgtttaagggttattaattgtagggctataatggagaaatgtggagatgtcgatgattgt

SEQ ID NO: 26968 - DNA, 919 bp, Arabidopsis thaliana
caacaagattcttaattcagttcctgttcaagaacacaaaacaaagaacaaggttgatctcaattcactcattgaactaaaagccgaggaagaatacagcaaatacatcaaacctacgagtgaagatgagggatatgcgttaagggcagccatcaagtatctttacctacaaagatcatggctatctccgggagatgaaaacctcaataaaccgcgatcgtgtgaaggtaaaggagtttacgtttatgatttaccgtcaaaattcaacagcgatttgttggtaggatgcaacgatatacttccaggggttaacttgtgtagctacttcaagaatgaaggctttggagaagctattaagaatcttggcaaaggttggtttgctacacacatgtattctcttgagcccatcttacactctagggttttgaagcatccttgtagggtttacaacgagacccaagctaagctcttctttgtcccttactatggcgggtatgatgttttgagatggcactataggaatgtttctgaagatgtgaaggaccgtttggggatcgaggttttaaaatggcttaattcaaaggaatcatggaggagaaacgccgggaaagatcatgtgttcgttctaggaaaaataacttgggattttaggagagataaggacccttggggctcaaggttccttgagctacaagaaatgcaaaaccctaccaagctactcatagaaagacagccatggcaggtcaacgacatcgccattcctcacccaacttatttccatccgcgaacagatgatgatatcacccgctggcagatcaagatcatgagtaaacttcgccggaatctagtaagcttcgcgggaggtgcaagacccgataaccctaataacatccgatcaacgctaatcgagcaatgcata

SEQ ID NO: 26969 - DNA, 559 bp, Arabidopsis thaliana columbia
gttttacttaaactaataatatttttttaacggtaatctaaaattatttttgatttcaacatcttcattctcattcttctgcttcctttttatatatatcacaacaatctctcttctctctcttcaccaattcttcttcttgattctctgtgtttattgattctgaggctttggtttcgagaagatgtcacattatagaagacattcgctagaaccttccattaccagtaaattccgtgattctttgagtttccaacgagacgatgacgtcatcaacaaaccagatttccgagaactcgattttggttctccgttgaggcctcgtggctcctcctccgccgctgccactcccgccgctagtggcagcagttcaagctcctctggttctgcttccggaaaacccgctgtcacttctcagtttgctagacggagtactccggcgagctttccggtttaagccagacagtccggttaaaccggatccgtgaaccggaatttgaaaccgggtcacagaagatccgcttccgctggaacgccgttgatttattccggtttgggg

SEQ ID NO: 26970 - DNA, 579 bp, Arabidopsis thaliana
cgccagtggccagtgtgctgaaaagctgtgaagttagtagtatttagcagcccatagtttcctccgatcagagactgtctacagtatgtttttgtatcataaagcgatgccataccaagctggtccaggtacctaccatcacacagtttaatctcattagaaatgcttttaatgtattacttatgataaccttagtttttgctgtcatgatatctactcttaccagaaactatacacgaaagcattagagacaagattccgcccactgttgtaggcaccaccggactcaccaacccatgccacagcctttgttgaggagtttttgattatgttcttgagactgcgaaaactttttgcctcttggtccagatatgaagggtttagaatcttttctatcagatgttcatcgactcctaatcaatcaaaatattgttttctttccattcaggtaagggaaatgatgaacctgcaggatctgaaacgaaagatagttgagtattcgggttacctggaccgagatcgtagatatgtcgagtagtagcattgagagagtttctgctttgtcaggtatctgtgaac

SEQ ID NO: 26971 - DNA, 442 bp, Arabidopsis thaliana
gtggtaagcgcagcgttaattgatacgctgaatgaaatcgaacccattcgcgaaagtgcctgaataatgcgggccgacatttctcgtcggccgaagagtattaagcggcgatttctggtgtactttcttcttcaattttcaaccgccggccagccacgccttcccagtattctggctccttgtccggatcaagcagtaccagcgcattctgactaaaccagtcatgcgggaaacgcagtgtccagtgactgtcatcagtaatcagcgtcaatgttggcggtgtggtggttgcctgacgttgagtgttgagtaatacgccaaggcgcaatagctgtatcagtggcaggaactgtttcttcttaaacaaggtaaagcgcggtagatcgtcgagcttaatcgctttacggtgatagcgcaccagtgtcgccatcatcagctgctg

SEQ ID NO: 26972 - DNA, 982 bp, Arabidopsis thaliana
  unsure (1)..(982): unsure at all n locations
tgatgaatcgatttttgttgtctattactgattggttttcttgttcagattcactgattcgaagagaatcatgatttttttttcccgctgaataataagcatatgattgggtgttttggagatttgtttactgattaaaaggagattcctttccattttcaccatttgctctgtttgacttcattgtgcttatatttcatttagatcttttgtttgggtttagctttggaactgataaaaatctgattttgtctcacggctttggatttggttcttaaattttggtactttaaaactggataaagatcagtgcttttttagattcttcgtttgttgatgaatttatggatgtatgtataattaaaccataatctctctgcttgtttgttttcttataggtaaatatccagaagcttgatcctcctagttgtacgaaagcttgagtaatggggtctagattaaacttcaagagctttgttgatggtgtgagtgagcagcagccaacggtggggactagtcttccattgactaggcagaactctgtgttctcgttaacctttgatgagtttcagaactcatggggtggtggaattgggaaagattttgggtctatgaacatggatgagctcttgaagaacatttggactgcagaggaaagtcattcaatgatgggaaacaataccagttacaccaacatcagcaatggtaatagtggaaacactgttattaacggcggtggtaacaacattggtgggttagctgttggtgtgggaggagaaagtggtggttttttcactggtgggagtttgcagagacaaggttcacttaccttgcctcggacgattagtcagaaaagggttgatgatgtctggaaggagctgatgaaggaggatgacattggaaatggtgttgttaatggtgggacaagcggaattcgcagangcaacaacagctgggagagatgactttggaggagtttttg

SEQ ID NO: 26973 - DNA, 566 bp, Arabidopsis thaliana
aaatctcaagacaataaaccggcctagggttcatgaggaagaagatagggtctaaacacttgagcccgctcgcagttgtcccatagaacatgctcactcgagcatctacagccacgggaacaatgtcttcagttaactcagcgaacaaaggactgaaccttagtagataaggctctctacatgtggttccctccggacaaaccactagatctcctttgcttaatagtctctgcattgcctcaccgtctttcttcctatctcttttaaggctaaccgtcttgagaggtgctatgaactcggagaacttgcttaggctgtaagtaaccgcggtcaagggcttgccagcgaagtggtgaggaaaactgggtcgaggagggtcctatggttgcatacatacaagactccactattacctttctctggacgaccgttattcaaattatgggtcttgaaagtgatcctaacaccggacatagaagccaagaaattggctacatggtaaggaagaaagactcctactgagatcttgaagacagcgagtaaaatctgataggagccatatgaca

SEQ ID NO: 26974 - DNA, 1061 bp, Arabidopsis thaliana
aattttgaaaagatggattggattaacatcgtgatccttttctacaaaagagtgcaccagcattggacgtgactgaagccaccaatgaggacggtctagccgacaaactcgaagccttagcatagcttgaagaggctcctccacccgaaggcgtaaaaaacgcaccgtttaggaacaaatcaccttccgatctccaattccatttcttccatttgcttcgtggtgcatcttcgtatttagtcacctttatattatatcaaatcaaaaagttggtttggtcagattaagttgaatatttctcatatgactaaaaatagaaaattagcttcttaattacctctttaaagacatggtcgtttggagcaagaaacctattgccttgactgttaatcgttggagctgcacttccaccaattgcatacatttgccaatgtgtataatcattattcaccacatgaaaatatccatgtctacatctgccaatttcccaaataatttaaagcgtcttagttaaaattaatataaaaattaagggacctttttagcaaactaaactctatttttaatttaccttggcattctctgaacaagaccttctccaaagtgattaaaggcaatggtgacttgcatgttcttgtctctcgtgtacgaatcactgtgtcccaaaagcatgactttattgtggtgactcaaatagttattagagatagtaatggccgttgatccatgaatggcgtctatcagaccgtcagcgcagttggacaacgagcaatggtctacccacacgtgggagccaccaaaaatcgagacggcgtcaccgtcagacgctgtcctccacccataatgcgacggagagtctctaacgtaagcattcccctttcttttacagtcatggatgttaacaccgtggatgatgatgttggtcacgtactggacggtgatacacgcgccaccagcaatgtggacgctcgctccacggccgtctatagtcttgaaagagttcataatcagctcttcttttagttttatgaccatgtcacgcgcgaagatgatccatagtg

SEQ ID NO: 26975 - DNA, 566 bp, Arabidopsis thaliana columbia
tagtatctgtttatggtcgacttttgatggtaaagaatatggaagcagcttttgaagagttacaaaaagtgaagcttcctcctaattctgtcacttacaactttctaattgcgggttacatgactgcctggaattgggataaaatggaagctacttttcaagaaatgaagaggggtccagttgagcctgacacagatacttatcagctaatgcttcgtgggtatgcaaattctgggaatttgaataggatggaagaaatgtatgaagtgattaaagatcaggttggtgtaaacagtggtcctttggtcagagctatgatctgtgcatattgtaagaaagctgttgaggatagagtccaacagattgaaaatttattgagtcttctctctggggaggaatatcttccttggttgaatgtgcttttgattcgactatatgctcaagaagactttgtggaagcaatggagagtaaaatcaacgaggcatttgagcagaagacatgtgttaataagtcaagtatcatgcgagcaatcattgcagcttacttcaggtgtaatgcagttgac

SEQ ID NO: 26976 - DNA, 490 bp, Arabidopsis thaliana columbia
ttcctcacagtgtttgatttgactttcgatgacatcagattccagtaactgtccacttgttgtttccaaagttcctgtaaacaaagaagataagcaaagcaatgtgctttttcaataaatctgtggaagaatgatgattaagtaagatcaatggttgcgaaaagatggcagttatagtaccgtgtccttctcaaacatgtcggttgaataaccgaaatccgcaagacggggaggagaagaagtcaacctagctggccaaggagctaacccacttcccttggttttatggtcatctgtatttaaaaaaaacaaagcatgactgtgacatatggcatacaaaacaaaagatctggtcctaattcctcaaaactcaaaataaccaacggaacagaaaaaagaagcaaatacttacgcttggagtaaggagtgatgcaagcttccattgaacacccgcaaccgcatcaggatcagcatctgagcgacagagagg

SEQ ID NO: 26977 - DNA, 495 bp, Arabidopsis thaliana columbia
gcttcagtttcctcgatcatggcctgtggagaaggactcttcaaattttcctcttgcttttgacatagggtatcatgcgcttcctttgttctctttaccaaattacccatcttttctttagccagttgacggatttttggtttaagtgccttcagctttttggtgaatctaaacatggtagaagttgacatataaacaggctctgttgttttccagtaagcttctaccataggacgaaattcctgcatttccgctatagcattgataaacttgaatggtttcttccccttcactctttcaccaacatcaatattgagatttatcctacaacgtaaatgatctgagcaccctcctgcctcaaatacattgtacgattgcgggaaactcatcttccatttattattcaccagaatccgatcctaactttttcagtattaaatcattctcctgtctattactccaagtgtagagcgaaccatgtgaagataggtcagt

SEQ ID NO: 26978 - DNA, 563 bp, Arabidopsis thaliana
agaaggcattggcggcgacaggaggagatcttgagaaagcacaagaattcctcagaaagaagggtctctcatcagctgataaaaaatcaagccggcttgcatcagaagggagaatcggttcgtacatccacgattctcggattggagttctgatagaagtgaactgtgagactgactttgtcggaagaagcgaaaaattcaaggaattggttgatgatcttgcaatgcaagcagtggctaatccacaggtaagaaaatgtcctcagctgaaacaatggcataaattggttgtttgtctctgacctgaaatgtctacgtgcaggtgcaatatgtttcaatagaggacattccagaggagataaagcagaaagaaaaagagattgagatgcaaagagaggatcttttgtcgaaaccagagaacataagggagaagattgtggaaggaagaatctcaaagaggcttggagaatgggcattgcttgagcagccttacatcaaagacgacagtgttctggtgaaggatctggtgaagcaaacagtggctactcttggggaaacacaaa

SEQ ID NO: 26979 - DNA, 472 bp, Arabidopsis thaliana columbia
ttcaaaaagcaacgttccagaattgttgcagagatctctgctccaaaacctcctgttacaggagcttcatggcttatctgcaaccccaagcacaagcaaaagcaatctataagatcgaccagacaaatcaaaatccgaagttgtcaatcaagattgcgtaaatcttacaagaagtctgccagtctttttaactgaagcctcaacggtttctttgtcccaaggaagcagtgtcttgagatctatcagttcacatgatattccttcctgcatcaactcaagaccttagttaatattactgcgaaccattcatcattgagttgaaagataaagctataaaccttttccgcgtccagacaagcttgttccataacggtaagctgagctccccatccaaccagtgtaatgtcattgccttctcttataacctgctcataactcctaatagtgagattctcgtctccgaaaatagacg

SEQ ID NO: 26980 - DNA, 308 bp, Arabidopsis thaliana columbia
gcaagacaccccgtgtttcttctttcaaacaactcaaactgtaagaacttttggtgttaaaatgtttttagcatttcattatccggaatctccatagtaatacatgtttttggaccaatcaggttctcaaccacaccggaaacccggaaaaagaacgtaataagggaagttgaagaagacggtgttgttgactccatccctcggagccaatcaagctttctagcaactgtattgggaggtttgctctcttacaagtcgacgccaagtcaacgatgtactagatacagaaacgtgactgcaagtagagt

SEQ ID NO: 26981 - DNA, 528 bp, Arabidopsis thaliana columbia
tcacggtgaaaaatgaatggttataaactttatagggccatgttccagtcatcagattatttgacttactttggtgtgactgaagaacatatagagcaagtccacaagacatcttgtctaagaagctcaacgagccgcaaacaaatgcgcaaccaccgacttctgcaccaaccaacacactctgcatactgattgctgttacctgtagaattgtatagccaatgaatatataagcatggcttataaccgacaatgatatcaaactgagcggtagagaacattataccatcattaatgcattcgcgatgccgataaagacagatatcgcatacatgaaagaacttatgtctctaggcaatagaagaattgctgcaccacagaatatccaaattataccaccagctgtataatacgccttcaagcgtttcccgttccatggaatctcctaacatgattacacacaaagaatagttgtaattacttagcaaaaacacaggaaaaagagaagctgacaacatatgtatgaga

SEQ ID NO: 26982 - DNA, 588 bp, Arabidopsis thaliana
  unsure (1)..(588): unsure at all n locations
nnnnnnnnnnnctaaagtccagctcatattcgcgggaaactggtctcttttaaccagtttgcgattattttcgggcaacttttagtttactgcgtaaactattttattgcccgttccggtgatgccagctggctgaatactgacggctggcgttatatgtttgcctcggaatgtatccctgcactgctgttcttaatgctgctgtataccgtgccagaaagtcctcgctggctgatgtcgcgcggcaagcaagaacaggcggaaggtatcctgcgcaaaattatgggcaacacgcttgcaactcaggcagtacaggaaattaaacactccctggatcatggccgcaaaaccggtggtcgtctgctgatgtttggcgtgggcgtgattgtaatcggcgtaatgctctccatcttccagcaatttgtcggcatcaatgtggtgctgtactacgcgccggaagtgttcaaaacgctgggggccagcacggatatcgcgctgttgcagaccattattgtcggagttatcaactcaccttcaccgttctggcaattatgacggtggataaatttggtcgtaaccactgcaaat

SEQ ID NO: 26983 - DNA, 595 bp, Arabidopsis thaliana
aacggccgccagtgtgctctaaagtggcggcaaattccggcgtctcttcttcgccgctgcgcgcgctttcccacggaaatagcgcccctgccagccgttgcgtcgcgctttctcctgcgcgcctggcaagttgtgccagcgataacgcagtaaacttcgggcaaccgtcggatcgctaaacagatgaaacggtaacaaaaatacttctgtatcccagaaaacgtggcctttgtagccttcgccggttaagccttttgccgcaatgctgctgcgctcgtcgtgggcaggcgtcatgatgcgcagatgataaagcgcataatctaacgcttgctgatcgtgcgcttcgccgccatttaccgtgatacgacgtttctgccaccattgacgccagttttctgttgatgctgcaagaagttggtcgtaactctgctgcgcgcacatttcaagctggcgacggacgcgctgccccactcgtctaaagcagcttgcctgtcatcccgccagtcgatccacaccagtttttgcaacgtcattgtctcgcctgcatgaagctgcgcactgggtatgttgcagtaaacggcgctctttggcggta

SEQ ID NO: 26984 - DNA, 572 bp, Arabidopsis thaliana columbia
tggttgcatttcatgagctccagtcgtataggcgatacaacatcgggattgcctttccagtaagctctaggttgcttgttgtaccaacttcttctcctagacccttgctttatatccccaaactcttcttcccagggccttagatttgtctccgaccttcatcacaacactcgagattcagagaagcgttgagtaaacaagtcaagggtcaatcaaaaagagagaaatgtaccatccccaaaacgaccaatccggaaaaggaatgtccaaatgagcttcgttggtgcaatatcgaaaaagcggaacaggaaaggactggtactcggtctggttgatgatgggtttgtccatacaatcaaacatcatgtcgacatcaggaaccatccctggatacttggtgagcagttgcagaatcccccaaatggtgaacatcattctgctctgcacacatgcgtaatagagatccacgtataacttccctgatagtatcacactcgaaacgcagcattcgcttttgccctcttcacgtgctctttagtcccccagtctttgccacggtctaaatccggtga

SEQ ID NO: 26985 - DNA, 908 bp, Arabidopsis thaliana
ttcaaaatttaatttttatgaagtataaaaagaaaactagtttcagttcagattgtgtgttagctattaaattcataatttaccaaacaagaaacaatatttattggtgacaatgacaaagattatatttagtctaaattcataaatttaattagaatattttgtggagttatgatttttttaagaaaataaaaagtatttgcaagtaaatgatatatatataaacttattgatagaggtattattgttcaacacagacggttgggatatttaagaaataatgttgtgtaaaacacaaattaatcaggaaatggtattggagaacttgaatgtgcagtccgggaacgaccaatcgggagtgctcacagatatgctaactctaaattcaacggtcaggatcttatacagaaaccccgcaactttcttcactgtccacgtcacctccgctcccctccagctcagctattcccagcttatcctcgcatccggtcaggtaaaccatttcacattttattgatttaaccgggccggttcttgattcttgatgaactattttttttaacgtgtgtgactaaaatagatgggagagttctctcaacgaaggaaaagcgagagaatcattgagaccaaagtatttggggatcaaattcctctgtatggaggcgtaccggctctgtttggccaacgagctgaaccggaccaagtcgttttgcctcttaacctgacttttacgttgcgagcacgagcctatgtgctcggacgattggtcaagactacgttccactcgaatatcaaatgcagcatcactttttatggcgataaacttggcaagacacttgatctctccaagtcctgttctgatcattgatcaaaatgaacagcataatgatgatttagagaagattaaa

SEQ ID NO: 26986 - DNA, 552 bp, Arabidopsis thaliana columbia
tagtaacgcaccgccagtgtgctctaaagcataatgaaagcggcacgctggggggcgaagattgtggctccacccagcatatactgctgcttgacgaattttatcgtaccgccgtgcgtctcgccggtaagcgtattctgtggaatatggtgccgtgcgacgaagaagagcattacgacgactatgtgatgacgctttacgcgcagggcgtgctgacgccaaatgaatggctggatctcggtggcttaagctcgctttctgctgaagagtactttggtgccagcctttgcagctctacaagagtatcgattccccatacaaagcggtactgaaaacactgctgctggaagcctattcctgggaatacccgaacccacgtctgctggcgaaagatatcaaacagcgtttgcacgacggcgagattgtatcgtttggtctcgatccatactgcatgatgctggagcgtgttactgaatacctgacggcgattgaagattttaccagctggatttagaagtcgctgcttctatttaaaagtgtgcgaaaactcag

SEQ ID NO: 26987 - DNA, 839 bp, Arabidopsis thaliana
gcatcaaaaatttgacttgtggttgtattttttttcacaggatgttggaatgctcaaatgggtcgaccttagtcattctataaatttacgtcagtgtttgggtttggctaatgctcataatcttgagaggttgaatctagaaggatgtacaagtttgaaaaaattgccgtcaacgataaattgtttggagaagcttatatacctcaatctcagggattgcacaagccttaggagtcttccaaaaggaatcaaaactcaatccttgcaaactcttattctcagtggctgctccagcttaaagaaattcccactgatctcggaaaatgttgaagttctacttttagatggcactgttataaagagccttcccgaatccattcaaacctttagaagacttgctttgctgaatctgaagaactgcaaaaagctgaagcatctttcttctgatctttataagctgaaatgtcttcaagagctaatactctcaggttgctcacaactagaggtttttccagaaattaaggaagacatggaatctttggagattttacttatggatgatacatccatcacagagatgccaaagatgatgcatttgagcaatatcaagacattttcgttatgtggtacaagcagtcacgtttctgttagtatgttcttcatgccacctacattgggctgctctcggttaacagatctttacctctcaagatgcagtctctacaaactcccagataatatcggtggcctatcctctttgcagtctttatgcttaagcggaaacaacatcgagaatcttccagaaagcttcaaccaacttaacaatctgaaatggtttg

SEQ ID NO: 26988 - DNA, 602 bp, Arabidopsis thaliana columbia
aaattattcggacagttttatcctcattctccacagcttaaaaacaagtcgcagaggagaccaaaccaataaaggccaaaaatagagagtttttctctggatcacattatctctttctttttcttcttcttcttcctcatggattctttaagaactcgaaatgtatccaaaagatccgatccgatcaactttccggcgaagtcatccatttcatcccggagatcattatcttcttcttcttccttctcatctttttcctcctgctcctctagctcccttgtctttcccggcgactctcctctgaattctccggcgactcctctccgtctactcggtgtccctttttcatgggaacaacttcccggaaaacctaaagactactctcatagactcaacaaccgtcgaaacaatgaatcttcaaatctattgctaccctccctcctcaccggaatatttcctttcggccacggaaaaaaacctaaacctaacaattccagtaagaagaacagcttcccgtgaccggaaaagatccttcgcggctggttgttggaatgtccaaagacgaaggatcaacagtgcaacgatgatgcgtcgaggtgttg

SEQ ID NO: 26989 - DNA, 467 bp, Arabidopsis thaliana columbia
tagaggagaggacctcgagatgaatcatcgattcgttaccaccacaatgggtgcaatgtgctgtaagattgatatgtcgaagtctcagagtttctcccacaggtaatgcgttttgtagagctttccacatgaggagcttagtcttaggagagctcttgatactccaaatattactcttcctgttgaaatccaaaagagaagggtctgagattaattcttatgtttcagttttcagagcttcgaaataacctgatttggtggagtagttgcctgaggcagctggaagccaagcccatttatcttttgctccgcgtttgcttggctttaagaggataatctccttctcatactctggcaggacatctcttatcagatcaatattccagtcagaagttcctggaatgagtagctctgcaactttccaaaggtgtgataaggctgtggcaggtcccataggcgctatgggt

SEQ ID NO: 26990 - DNA, 644 bp, Arabidopsis thaliana columbia
ttaactaattgcatttctggcgtaactgtgcaatagtgatctgaaatgagaggtcataacatacgtataccacattggtatgaataattataagaaacattgatcataacagtgatttgttaatcatattttcctggtaaattgttattacaacactcaataacacggggaaaagaaccccaaacagaaacatgcttattagaacaatctctcccaatgtcgaatcatacaacagcggcaaaaattgcggtacctttcgtatattatcttctttgtataaagcctaaccttggctgttattgtaaccccaaatgaatccatattaaaaagaaaaaaagacgcagccgcaaaaatattacactcgaaaacgactcaacagagcaaaattctttggcctcttgatgcctccaaaaaacatctgtacaatctctttaaggagcacgagccccttgaattctcattatctcgggttagtcctgcggctaaaaccgctcttcttcttcatgaatctctcggcctcttgttcaacctggagagcaaactgaagcctctttaaattctcagcacactgtccatgtaatcccggtgagacaattccaggaccttgttgatcgataggaccgagatgcattttgtgaggtgaa

SEQ ID NO: 26991 - DNA, 591 bp, Arabidopsis thaliana
actgttcgtttggtggcttacttgccacctcatcacttcaaaacgacgtaggctgtaattttccatgtcatcattccatgtcagcatcctcaacggaaatacgaaacgtcccttgcttctttaactcgtcttcccagactgtgtttaacgcctgaacgttacaacttcttcattcatcttctcatacatcttcaatttctttcatctttctctcgatatggctgatcccgttacggtcatagttgtttccggttcgtgggttaagaaacagagattcgtatttaaccccgacgaaagagggtgtagagttgtgcagctagaagcagaaagagcaacgcacgacagtcttttgaagctggtggtcgatgattacggtttgtatcagtcgacccatcagttaaggctgagttacatgttctctaacaagactctgaaaaatatgtcgtttgatactccaacagtttatatctctaatgatcgacaattgcaatgttatctaggtttgacaaaattcgagcagctacgtctctgtgtggagttacggctgaagatcaagtgatattagtcggaaggacggatcaagaggaaggg

SEQ ID NO: 26992 - DNA, 451 bp, Arabidopsis thaliana
gaagatttctggcttgtgacagtgctctgttcattgattccgctatattcgtagtcattaaattgtatctatcaccggggaaatgagcacgcgcccacatttcaacacccgctctttggatgtatgcatgtagtagaggatcaagctcttcaatctcgttgaacgcgttagtaaaaatcattcagcatatgacaaatcccacgagcagacaacggataaaattcaccaattgcattgctagtcacttatgtctgtctgagattatcgacaggtccgatacatcaggaatcacaactttgagttgcgtaaaaaaccaacgccaagaatcatcattttcagtgtcaactacaccgaaagctaacggaaaaatctgaaaattaccatcctgagcaagggctgtcaagagcgtcactttgtgacatacatgaagaaaggtacagtcgacaacaac

SEQ ID NO: 26993 - DNA, 508 bp, Arabidopsis thaliana
cttcaaattaggtacgaaacacaggccccggaactcatcatcgatcgacatatcattcaccttctttgtcactaactgacggcatattagtccaaggacaagcttagcattgaaagatgccttgtttttgggtattttaaaaagttccccaaatggagaatcgagaagaaactacatctctggtttagagtacgcgttcatcttcgtctcggaagggtaccggtctagagcaaagagtcttggtggtaactcttcaactgtaagatcttcagtcggagcaacacttggactacctgcaattaaaagtcatatactgttaagcaaaccgaagtagtgtacgtacacagacattttccagattataactcaaaatcatatttttggcggaaacagacatttccaattctacttctcaatttttcatcctaaagatatgctaaattccgacaagttcctaacctttaatcagacaagctttacaattctgataccccaaagacaacaaacg

SEQ ID NO: 26994 - DNA, 562 bp, Arabidopsis thaliana columbia
acacttattttcatattctaacacacatgtacgatcaaatcattactttctcattaatacaatcaagaacaccatccgcggtaattgagaattttgttgttctttgagaatctctcaaagatccgttctttgaagaaacccttaaaataaattctattgtgcgagttttgactctcacaaaatgcttacctccgtcattgatgactatacgtggcactccaaaatgagggaagatgatagacttgaaaagtttcacgacaactactcaatcattcttttgactagcgatagctctacccacttggagacataatcgacagctactaggatgtagagattcttgttggatagtgggaagggtcccatgaaatctatacccctacaatcgaagacttcagatttggtaatctttccccttctctaacaaggatcacactgcgatatgaacttctgagcatcctgaaacattgtaggcaccaaaacactgcttgaagaactttggatactgtcttgaaggttgcaaaatgaccaccatagctagagctgtgacaatgagatagta

SEQ ID NO: 26995 - DNA, 576 bp, Arabidopsis thaliana
tattgagataaaacaaactttacgaaaaaaatactttcagtttaagttatccctcttgcttgaagccaaacttgaaagcgtttgtcaaatcttcgatctccacactatttgattgccgataaatgattccgaatgtgcttatcaatccacccgactagtcggcgtgatgggttcgtagatgcgccatgtttgaaatattatatgtttcaattttaccaataatcaatatctgcgtgactctccattggccgatgcaataatagactagagcgtacaaaattctaaagttgttatgatgtttcaactcttctgtatccaatacttaaaaaaaaaaagaacaaaaggagagtcgcatatatccacattgcagcctaataagtgtttgataaaatgtctggaaaagaaaaaaacactcaacatcttctttcaaaagcatcattacttacactgctcattcactcgtagattgcaactaaaaatatatttgggcttgggctctatcagtcaaaagaaatgggtttgggtctggttaattaatttctcaaccctattaaccctaagagaaattgaagattt

SEQ ID NO: 26996 - DNA, 368 bp, Arabidopsis thaliana
cctaattaatgttctgtcagcgacgtggtagaacttgtgaggcatacccttgtggatcgcaccattcaccttcacatcgacgtaatcgccgaccttgaaggttctcaggtaagtcgagagtggaatgtaacccttcttcctgaatggcctcgcgaacagatccctcgttctcgcccgaactccatgacccgctggcatttttcctcctcgtgcgacaactaaaaccctagatcgccgaagaaatgaaatgaggaaggcagagtgtatttatatctctgttttgagattagggtttcgtaaacggacctgttgggtcagcaagttgggcttctgttttttagaaccagcccacaaataatcaagagtga

SEQ ID NO: 26997 - DNA, 556 bp, Arabidopsis thaliana
gctattccacagggacaacctcctctagagatgccatcgaggagatttgatgagcatgagcacagacatgagcttagcgagcagagaatctcacatgtcccggctaggcattcttcattcgagtcccgggagcacaagagaagaaggaaggctacactcactcgatctagcagcagatcacgcctcattcactcgaggagatcactcgaccgcggtgctggccgcagtagaagaagagaggtcgagtatcctcagagcggtgctggccgccacagagctgatgaggtcgagtacccacctgctggagctgatacggaacaaggcggttcgtctatggcctgagagcagtcacaggcagccattgatgagcaactacgttcattcttcgactgaggtaagcgcctcacttcaccattgtattatatcatctgttgtgatttgttcttcattttgtttctatgattggatttgtcctgagtttagtcacaaagtggactgtgtgatttaagtttgggggagggccaggaagtgtgtgttgcattgtgtatatttttga

SEQ ID NO: 26998 - DNA, 647 bp, Arabidopsis thaliana
ggatctcttcaactcaaattgctgcacctactacccatcaatttatctggactataaagcacacacctttgctgaatactcaccattctggaaaaaaaaaattaagagatgattagtagagtcatcactcaagaagcttacaagaagaaagtcatccaagaaacgattggtgatcccggttcattcactctgccatgctccctaggaccattgacatttaataggtgccactatgatttgggagcatctgttagccttatgcctctctctatagctaaaaggctaggagtaatggaatacaagttctacaacctaactttactagttgatggttctgttgcacatcctcatggtttaatagaaaatctgcctgtcaagattggaaatgttgagatacctacagactttgtagtgctggatacaaataaagaaggaaaggatccctgatcctaggcagactattcttaacctcagctagagcaatcataaatgttaggaatggaaaaattgatctaaaccttgaaaaaggtatcaagatgaaatttgacatgagcaaagcttcaaggaaatcaacattagaaggtcaaaatttcgggattcaggacatggatgttgatgtagaaacagaagctgaaaaccaccaagat

SEQ ID NO: 26999 - DNA, 545 bp, Arabidopsis thaliana
ctccccttttaactcctcaaatccaatgggtatttacagatctatggcccaatcaggcccatttatgaaaaccctaattcactttataagtgtcatgttttttatcttaacaatggcttctctagggtttcagccaccagactcaaacagagagtgaaaatgccggcgggacacggagtgagggcgagaacaagagatctgttcgcgagaccattcaggaagaagggttatattccactctccacttacctcagaaccttcaaggtcggcgattacgtcgatgtcaaggttaatggagctatccacaagggtatgcctcataagttctaccatggtcgtactggtcgcatctggaatgtcactaagcgtgccgttggtgttgaagtcaacaaacaggtgttgattactcaaatctctaatctgtttggaaaagttttgattgttgaaattagggtttgaatgtgattttgattctttcatttggggtttaattcgtctttgtgtgagctatctgttttgaattctgagatgttggattggtattg

SEQ ID NO: 27000 - DNA, 556 bp, Arabidopsis thaliana
gtgaatgcgatcgcaaacattgttagacagcgagattcaagcgattcggagtagtaagaacataggagagaaagggaagaagaagaagaagaagaagagtcaagtggttgattttcgtacacttctcactcattgtgcacaagccatttccacaggagataaaaccacggctcttgagtttctgttacagataaggcaacagtcttcgcctctcggtgacgcggggcaaagactagctcattgtttcgctaacgcgcttgaagctcgtctacagggaagtaccggtcctatgatccagacttattacaatgctttaacctcgtcgttgaaggatactgctgcggatacaattagagcgtatcgagtttatctttcttcgtctccgtttgttaccttgatgtatttcttctccatctggatgattcttgatgtggctaaagatgctcctgttcttcatatagttgattttgggattctatacgggtttcaatggccgatgtctattcagtctatatcagatcgaaaagatgtacgcggaactgcggattactggtac

SEQ ID NO: 27001 - DNA, 1185 bp, Arabidopsis thaliana
atcaaaagtcgtacaatatttaaaatgacatgttcttcctcttcatctcaaagttgtaaaaataagtctgttcgtttcgtcgccgcatgtagttgcggttgcggcagacgcatatcgaagctgttcgtttcactaccgcagatagatgcggtaaaacgctgcggccgacgcaacgttatgcggcgaaaaaaattaaacgcggattaaatttagcgttagaattaaaaagctgcgattaatatgccaaatgacagaaatacccttaatatatttagaaaacaacgataaaacctaactctaaaacctaacacattcacgatctgaaaattttcttctcttttacacaatttcgatctgaaaaagtaaagctcagcgatttcgaattaaactcggcgatttcgaagtaatgggttttgttttagaagttctctggttgaccctgaagaacaagagatctgttcgcgagaccattcaggaagaagggttatattccactctccacttacctcataaccttcaaggtcggcgattacgtcgatgtcaaggttaatggagctattcacaagggtattcctcataagttctaccatagtcgtattggtcgtatctggaatctcactaagcgtgccgttggtgttgaagtcaacaaacaggtttcgattactcaaaattctcatctgtttggaagagttttgattgttgaaattaggatttgaacgttattttgattctttgatttggggtttaattgtcttgtgtgagctatctgttttgaattttgtgatgtgtgattagtattggtttgaaagcttcaagcttttcttcttgggtccttcttttgctacttgtataatttgcaatcaatctactatgattcttagtgatgttttcattttgactttgatgtttatcatttagttgaatctcttggagagctaattttgagttttgggttgagttttagattaagcacagaattataaggaagaggatacatgtacgtgtggagcatgtgcaacagtcaaggtgtgatgaggagtttaatctcaggaagaagcagaacgatgtgcttaaggctgcaacagtcaaggtgtgatgatgagtttagtctcaggaagaagcaaaacgatgtgtttaagactgctgctaaagctagatgtgagactattagcactaagagacaac

SEQ ID NO: 27002 - DNA, 647 bp, Arabidopsis thaliana
taagaacttcaatcattcggtgaacaacttcgagttaactaccaagagaccagacgcctcctcctccaggtattacttacttccactataaccacattatagatgtcccatccggtttccatgcggtgtcagaccatacaagctaacttaacccgtgcgtttcgtacctttccaggttgcaggtcacaaagacattttagaaggtgacccttacttgaggcaaaggctgcagcttcgtgacccatacatcacgacattgaacgtgtgtcaagcctatacactcaagcagatccgtgacccaagcttccacgtcaaagtccggccacatctctctaaggactacatggagtctagtccagcggctgagctcgtgaaactgaatccaaagagtgaatacgcaccgggacttgaagatacggttatcctcaccatgaagggtatcgctgctggtatgcaaaacaccggttaaggcagtttaaaacgttcttgtaccattccctaaatctacgctatgtaatgtattatgttctatgatgtgatgaaatgtctccaactcctatcccgtacgctttttaatgagtatgataatttcttgtgttattctattgttgttatgttacgatatctaggaaatatatccgtgaaag

SEQ ID NO: 27003 - DNA, 448 bp, Arabidopsis thaliana
agtgtaatgcagccttagatttaatctaagaaattagtaaacactatcaggcagacaggtaaaaaaggttgcagagaatttgaactaaccatttcactaattgcaaaacctttggtccatttaattagaactcctgatgagatggatgtctgcttgactgggaaagacaaagtaaacgcaagttcccttatcaaaggttgtgacaaactgaaatcgttcccttctatttcaataaacctctgcaaggatgatgcgagaaagtcgaagagaacctgaagaatcaagtagcaagaatcatctgagcatttaatctgtcagatcataagaattgagcttcgaatagacgaatgttggagagagccttgtcacctcgctagtgctcttcatcgaagaagctcgtatggaatgtcgtgcaacatcttgaacttcaagagatgatctttgacca

SEQ ID NO: 27004 - DNA, 561 bp, Arabidopsis thaliana
tacttcaggagaaaaatacactattcttaagaaataaattgggtagtataataagaataagaaggtttagtgagctacatttgagagcaatccgttttcttaaacgacacagttccagaaacagtgtcgtatccaacaaggaagttcatttgcgccaagtttccaaaaatggttagttgttcatttgcagcaaatgcaaagcaagacacatcttcagacactgccacaaacgtattcaaattgccgagtttcacatcacctcctttgaaatgaacagttatgtctggaactttaaaactagagctgtctctataacaaagactcagaataccatcgggatcttgcactcgctctgctttgattgtagaagcaacgacagattcaagctcatagtaaaaattggatggcaatagagttagagtggtactggagtcgataacaatgtttccttctccggtcccaaagattgtgcttgtgaattgaattttcttgcttcccacgctaatggcttctaggtttaggaaatagtatgtggcgggatctttcttgaccatggaggtg

SEQ ID NO: 27005 - DNA, 627 bp, Arabidopsis thaliana columbia
  unsure (1)..(627): unsure at all n locations
agatacgtcggaggcagcccaactaggcgatgtctttgagtgagaaagactttccatggaggagatagaccaacggaggaaaagtaacggcggaactccatagcagagatgattcacttcaatggtctctctcgggctttgggccagagagaaaagaaaactagggcgaactcatattttgttgagttagagtcttacgcggtgtttttgtgcttactcatttgcgctaggtaaattgttagtgtggaaccatgcatcaaaattactcttgacataggaagcaatttgttttgtacaataagttttatcaatgatgatggtcttgttgtagcagaaatttcctgtgtatctgtcacatttttaatccactctttgacttttgcttaagtttgtgaaaccaccttcgaaggactctctctgaacttattaaacacaattgtttcttgctttacagatcttctagatgagccacaagggagttagtttctgttggtctattagattattgttcgaaaaagtatcaacgagaaaggatatattttcttctgcatcatccgtgaaatggtgcctactataatcggagaatttgaaatcgccanatcatagttgtatacgnaatttgaatag

SEQ ID NO: 27006 - DNA, 532 bp, Arabidopsis thaliana
ttccattcatccagatcaaagacattcatagcatacgcccaaccacaagctcgagggtcaaagttcttggaaatgagtggcctccagcagtccagataccggtcaacgcgccgcccgctttccccacacgtctctccagcaccgttcacattccctttcagataaactgaagaaagaccagaaaggtgcttctggagaactatatcatcaaccaagaagagcactttgctgagcttgggacagatctcaggcaagtcaaaacgaagatgattaaggatcgataagtatttcggattccggaacttcaagttggtgtctgaatttgtatggtgggctctgaagtaataatctatcatcgatctagaactaagctgtttgagaacgggactgtagcttgaattgagggatgtaaattcttgaagattctgaacctggatggtggctttgcaggtggattgttaggaccacatctcattgctgataattgagtctgttgtgacgatgtggaagacatggttaagggatgctggaa

SEQ ID NO: 27007 - DNA, 530 bp, Arabidopsis thaliana columbia
gacctaaacccgtttaccttgttgatttctcctgctaccttccaccgtcgcatctcaaggtcagtatccaaaccctaatgggacacgcaagacgtgcaagagaagcaggcatgtgttggaagaacaaagagagcgaccatttagttgacttccaggagaagattcttgaacgttccggtcttggtcaagaaacctacatccccgagggtcttcagtgcttcccacttcagcaaggcatgggtgcttcacgtaaagagacggaagaagtaatcttcggagctcttgacaatctttttcgcaacaccggtgtaaaacgtgatgatatcggtatattggtggtgaattctagcacgtttaatccaactccatcactcgcctccatgattgtgaacaagtacaaactcagagacaacatcaagagtttgaatcttggagggatgggttgcagtgccggagttatagctgttgatgtcgctaagggattactcaagttcataggacacttatgctattgtagtaagcacagagac

SEQ ID NO: 27008 - DNA, 507 bp, Arabidopsis thaliana columbia
cattatatctgatattattattagtgatacatgcgaagacaaaatcaacgaattgaaaaaactattaaaaacagagataaacgacaaacgttatctgataacaacgatgacaaatatacaacaatgcaacgagaatacaacattaagcatttaaaacggctaatcttatatcagataacgtaatattaggttaataacaaagttatatactaaacaatatcgaggtgctaaacgtacacaaacagattcggataactaagactacgacaaaagcttcacgcaattagaaaacggttggaaacaaacattgtaaagaagggtaacaacagagttagctagtaacccccaccaatattaaggccgacactagctttttaacttcacactgaagaccgtcgacctcaaattccacacattcagtgacaccacctgtggcgtgagtgtggataaggaatatagagaagatgcctgtatcgagtggggaacaacctgcgggatgactagtgg

SEQ ID NO: 27009 - DNA, 572 bp, Arabidopsis thaliana columbia
tcaagtactcgcgatatccaaagcaaagttgacagcagttgttggagtaagaccgcccttctccttgaggtattgatgaagatctccctgtcaaaaagatgaatcatttatttagccaagaagaaaaattgcataagaaaaagaaagcggatagtgaaaacctaccccgcgtaagtactcagtgattaacataaggggctttctttcggttaccgctcctaagaattggactatatttggatggcgacgttaactagcaaatcaacctcatgcctgaagtcctgactgtatatcacaacaagtatggaaacacaagaatcttaggtgagagcgataccaaagtatcagctaaaagctagaaacttcttcgacaataataattgggatataagagagaagtaagaacttacataaccagtctatcatctgaaagagaaggaagaatacgtttcacagctaccggtgttcctctccaataggctttcacaatctcaccaaatgaaccctaaaagaatgtgaccaaccccaaattagccaaaagaaactcatttgctcaaaactccattatattg

SEQ ID NO: 27010 - DNA, 883 bp, Arabidopsis thaliana
tcgatttctcgccaatgaaagatttgtgttaaatcagttaatgttgaaaacaattgatcaccaaaatcttttcctcacatactgtctcaaagtaccatctgcatcaaagtgctggagactactgcaaaacacactgtctttgcttggaatatattatcttttctgttactgcaggtacctagggcttttgtattagttacattttgtggcatcggttgtctctgtattcatcaagttcttcagatggttgtggctcaagtagtattaaaagaagaagtcgtattgatccaggctatgttcgtattgcacgaaactggaagagcaagcttaagcttacctagtagctcatgccgttctgtggtccaaatgcctgaaggaggaacacctttctggattcagtttcctgatcagaattacacgctggttttctgtctccggggggtggggaagtccatacttgtcctggaccatgtagcgctgacaccagacagagcatggggcctctttagtccctctcttcattctcattgtggcctatgttctcaagctgatactttttaagattaatgaaggtcatctgtatctttgctaactcccttgttccctacttgtagttcgaatttgggttctctgtgctcttgttgactgttcaataatgggtcttctcctcttgctttaagttgaggaaatgccatggacatcaaaatcatgcaagcttgcctcttttggtttggttatgttcattattacttgtaatggacgctgcatataccatgtgatgttttaagagagtcgttcaagtaggctccgagattaaatgtgttcttcaataagtagaatttgaatagttcattgatctcacacggaattagccaaatgcaac

SEQ ID NO: 27011 - DNA, 856 bp, Arabidopsis thaliana columbia
ctacctcacaaacccggcaagagggacaactccatgaactccaatgaaataaatctgcaacttacatcaattagacccaaaacacagactttagcaagcgaagaaaaggacagcagcaaatagaatgtaaagtacctctatgttgagcccaagactttaaacaattcttgtggtacttctttccacagtctttacaagaaagcatcctccttgctctatcacttccttcaccttctcctaggaagcacattctgcacattatattcatgccggagtggcctaattcttcaccagcatgatcgtttgaggtaagctgtacaacaaacaaacaacaacaaaaaactcaatcaaagcgaagtcaatacagaaaaaaattaatatcatcttcataaaaaaaaaaactcacgtcattgacaccagattcaaacctccgagcataatcctcagcagcttcgacagtaacagcagcttgtctctgaagagcaacacgtttcttctgagcagaagcttcctccgccaattcatcaacaccagaaccaatagcaccatctccaacccccaaaatcgaaaccgtctgaggagcaggaacaaccttaggaaccctaacttgaacggtacctccaataaaaacattagaagaaacagcaggatccttgagaaactcctccactcgaataacctctttcaaaaacttatgtttcgcattggctccacggagatcccgagaaaaccctaaggagcaatggcaaatccgacgactacaacaaaagagagtcgattaaacagagaagaagataatagtgaagcgttaaaggaatagatagatagagataccatgtaattggacaagctacgt

SEQ ID NO: 27012 - DNA, 560 bp, Arabidopsis thaliana columbia
agaagtggctaagtgtttggaacgaaggagaaatgaatcgaattagggttttcaacactggagtagtcgtatatcagtcgcataatagtcactaaatcaattgggtttgggcttcgacgattaaaagcccaataacttacaccgttgtcgctgtgtagtcgtataattgtcaccacttaagttgggtttgggctttgtgatttcgaagcccaacagctaacaagatagtcgctgtgtagtcgtatattaatcaccacctgagttgggtttgggctttgttattcgaaacccaacatcttacatggtagtcgcataatagtcgtaatttcgtcaccttatgcgttttaaaattatttaataattttttaataattattcaaatactttttcaaatacatcgtatattcaaaaatttattcaaataattaattatacatctatttcacacaattattattcattttcgtcttctatttcatcttcatccgaggacgataaattacatcggaattcatcttctggttcagcatctccaatatcgtaatcgaggatgattgggg

SEQ ID NO: 27013 - DNA, 1044 bp, Arabidopsis thaliana
gacaacggcacaacttccgacaaaggagttgactgcggcgtagattgcggcgtcggaagtggagaattccgacaaacgggacaagaaccattgagcttaagccaagcgtcaagacaataaacatggaagtagtgttacactcaggcatcatccttaacatctcttcttccatgtactcacataaacagatcgaacacgtcgtctctcttccttctccgtcgtgaaacccatcaccgtttactacggcggtgatatctttagtgaaatggaatttagggtaagagttgatgactgaatgatcaagacctccaacgacgacgtttccagactcaagatcgtcgtcttcagctacgaatatgattcttgggacgataacgccacggtcgctaaacgatgcgtttgcgtttgcgtttgcggcggaggcagagaagcggaggcgtgaggcgcggcaacagatgtaagaagagagaatgattgtggagataagaacgaggaaacctagagctatggctatggagtagccaaggccgaggctagttatataggtagggatagggacaggaggtggaggagggaagacgacgagggtggcggttgacatttgatggtgaagaaagaggttagggccatgtgggattggcgtcgatggcaaaaaagagtgatggagagattattattggtgtatttatttttttggtgttttggggaggtgggtggggaaatgtagctacggcattgaatacaatgtttggcaaaatattaatagctttgcatttattaggttttcttgttatacgttttgtgaatagtgacttcacttagtagtgtggcccaagggaggtcaagtttttctagtcttatttagtttaaatgcttgagccgtatgacattgacatgtgtgatattttgttgttgtttacctctagctattttcgtttcatcattcaacattttattgagcaatgagcagatagtaacagtatctcacgacttctaagttcattctattttacagtttacgtttgatcataaactttagtaaac

SEQ ID NO: 27014 - DNA, 465 bp, Arabidopsis thaliana
taactcgttccggtaactcttcttgccatcatcataaaccggagtattttcagggtcgtactccaccggaaactccccacaaggcaagccagccagggaagcaaattcaagtagtgaaaatcacattgggtgtgtccaaaactcatactttttcttagtaaccaacttcctacatagtaaggcatgaatgactttacccgaagtcgcaaccctactaaccgacaaatggaatagagatccaaagcatgactgaagaataaaatcgaatttcactgtctcatcaaaaaccttccggacaaaggatagaatatctagtctagagtatacattcagccttcccttcgaatattgatcgctggcgaagagtccattaggaagttttgaatcccactgagaatatgtgatgggttgagttgttaaatgggttacccatttaaataagaatttaattaattataattgtaa

SEQ ID NO: 27015 - DNA, 613 bp, Arabidopsis thaliana columbia
ctgtccgtagctcagcaagatgcctcttgatatcggtacagtcttttgtagtataattatttactctatggatgttgtcgtatgccttttcatcgcaaccatgttgtcagagatggttgtctcgatcttctcttttccaagagatggtgtaatgccccttaccttgactatgtggccggacgtacagtctatcgagtagaatgcgagatcaagccaaaaaaatgcaagatcagttcgaccatttagtgtggcaagtcatgggtaagaagcattgaattggatcaagtccatgggtaaaggaatgactcaccatgagacggatcaagtttagctacaatgcgacaaatcattagaaggtcgaggggaatccatttggacagtgagatatgtgtatgggtcgtgaatggtcgcgagattgatcggagaatgcggataagtgacgatagctggcttactcggttaattatggcatggaacgtgttatagtcctaaggaaaccttaatttgcgtcatggaccctcaagagacattggaacggaatgtgccgtattaatgttcttgcggtctggtgacagatcgtaggtttcccggaatgaagaatggacgccaggat

SEQ ID NO: 27016 - DNA, 575 bp, Arabidopsis thaliana
cattgtaaaagctttgtcacaatcaatacaaaaagtccattcgttcttagcaatataactctcaaggtttctgtgaagatctagccctcatttggcgtcgtctgtggggacggaaatagatcattctaacaccaaaacttacacatcaattttgaacactgatcatggatcccaattcatccaattcaacgagatatggcttaccagttcagatcccaaacgataacgtcacggacgggcacctcccaacatatctccctctcggaacccaggttgatgctgtccatgacgttgttgcggagaacatctcccaaaactcgaactcttctggatctgacaaaatcctccccctctcgcaaacaagggatggagagcaaaatatcacgatacagcctcctaacgtagataacccggccaacccgtctaatcaggtccctccgagacttgccaccgacctggccgagctccgcgcaatgatcctgaacttgatcaacataagcaaaatccaagaagttgcgcatcgaacctcgccgcaatggtgggtaccagagaagcgctcactcgcatggtcatga

SEQ ID NO: 27017 - DNA, 577 bp, Arabidopsis thaliana columbia
ttatcgatcacccagcaaaaggggcaatctacaaaaccatatgaatcactaatgagaaaccctattcctaacagcagattattcagacatattgattgaaacaaacaacataattgagtatgaaagcataaacacagcaaatagaataagggaaagaaaggttctcttcactaaattaagaactgaatgaatctctaaaaacaatggatgaatagcttatgtctctctgtaacagggttttgcaaaaagcttgagaaaagaaattagggtctaaaacaatgtatataaaccctataaaacgtccagggactaataatgcaaatagagaaatcttctagggcaaacttccttttctgtaaactcgtgtgacgatcgacactctggctgattcctgaatctaaaatcgtccttaacttccttttccttagcttttgctccaaaatgtctccttatttccattggtgtctcattgcatagaatacctgaaaagacactaaaaagactcgagaaataacataaagactcaaaatcctatacctaaaacgtagataaaatcagtgaaattagggttatatta

SEQ ID NO: 27018 - DNA, 607 bp, Arabidopsis thaliana
tccagctgaaatagcaatagaggagcccatactcgatcgcagtactcgatcgcaagctcaagcagtactttcttctgttaaaaagcatgtctctgctaaaaccaaggataaagtctttgttcctccaccctacaagcctccactaccatttccagggagattcaagaagcaactaataaagaagtatgaagctctcttggaaaaacaattgaagaaccttgaaatcacaatgcctctagtagactgtcttgcgctgatatcggactcacacaaagaagttcaaggaacggtggcgttaactcacaagtgtagtgcaatcatccaaaagaatattgttcaagaaaagttggaagatccaggatcttttactctaccatgctctattaggcaactggctttcagcaactgtctatgtgatttaggagcttccgtcagcctaatgccactatctgtggcaaggaagctgggatttgcaaatataagccgtggacctatctttgatccttgctgataggaccttaaggaaccctatggcctactagaagatatgcctacaagattaatggagtagaagtgccacagactttgttgtgattgagatggatga

SEQ ID NO: 27019 - DNA, 675 bp, Arabidopsis thaliana
tgaagaattacgttggaaagaagagaagaataaggaactccaaaaccaccgatgcttcctctcctctctcgaatcttctaccgaagcagattcctatacttttgtcaacactttttaagtgttttgcgtttccaatgtactttgaagattattctcaaaactccataaaattcttactgaaacagagaatttttttttttaattttaatctaagaattatcttgaagctgtgttctttggcaaatataaatacacgtcgactaggacaacacttgcgctctaaagattgcaaatccgtgttctatctctctcaacaattatttcccctgcttccaaagctttgacaacatttctattcaaaaactttagttttgagttttgtttttcttgtatacttctccccaaaatatgagcgatcccaagtatgcatatccttacccggcaccgggaaattacccgcaaggtccgccaccgccggtgggagtaccgccacagtattatcctccaccaccgccaccgcctcctcctccaccaccaccacgaaaagttggttttcttgaaggactgtaagtgctgtgtttttatgtttcataatattagtttgtttctattattaaggagtgatctgttggaatttataaatgaacttcaatgtttgtcggtggtaatgtgtgt

SEQ ID NO: 27020 - DNA, 500 bp, Arabidopsis thaliana
tgtgttgtctgaaatcttattgacaacttattgtgttgtctgaaatcttattgacaacttattgtgttgtctgaaatcttgacagcttattgtgtttgaattcttttgtcttgtgttgaacttgttttctcacttgttttctgttgtgtccttgtgagtttttgtgacctttgcaggttgctccgagaaagaaaggaaggatttatggtcttggatctctgcagtttgaagcatcctcagctcatagtggtccaacacttcctagtgatgatccggttatactttctgcgaacgtggctgccgctgaagcttgcattcaaaatcaggctgagaagatcaacagctttgatatcctctttgactatcttgctgagaaagatccagctttagctgccattcttcgacgaggttcctcgacacagacaagaccggttagcgctaatgaaccacctgtagctacagctccagaacagcaagccaatgaggagacagctgctgct

SEQ ID NO: 27021 - DNA, 586 bp, Arabidopsis thaliana columbia
gtgagaattccgagtagtctatttcatcttcaaagggcagctcgattttgtcgcttatgatgaccggaatgcagtgactgacaatggcatcaaataaccggcatgaagatggagtgtctccagctggatgcagacaaaacttagaagatctcatcccttccggtagactggtaacaaaacaaaacacaagtagaacaattactatcattctgataggttaacattagatatcttcctctattctgctctaaatcagactacaaaatgaagagcacgaactagctgatacaataaaccaaagatagaaaccttagtttgttaaagagcctaataggtccccaaaagactcaaacgcctaaacacttgaagcactatcctagctatatactcatgctagatgaaaccctatcacattggtctttctaaaaagttaagatttctgagttctgaaccttggactgagaatggttacacatttcctaagattcaactacatggacctctctaagcttctgaacctgaaattacaagtatagtagttacactttgatgtttgtgagtagtacctttctcaagtgacacagag

SEQ ID NO: 27022 - DNA, 488 bp, Arabidopsis thaliana columbia
catacgttactagttttttaataaataaaaactacatacgttacacaattagttatttagaaaatactcggtcttgaccggaggatttcgatatgattaaaagactaattcaaataaaaactacatagttttgtgatctatatcattaagtaattaacaaattacatgttgaaaagttagatgttacattatttcatgcatttaaatctatataaggacgtgtgattagctttaacattcaaatcatcttgagaaaacactaaaggtcaaagaacaatcaataaaaacaaaatctcttacctcaaaagaaaaagctctcttatggctgcttcttcttctgtgagaccaccccaacgggacctcaagtgttcatcaacttccgaggaaaagatctgcgtaacggcttcctaagctttcttgagcctgccatgagagaagcgaacataaacggtttcatagacaaggacgaagtggtgggcacagatctg

SEQ ID NO: 27023 - DNA, 487 bp, Arabidopsis thaliana columbia
gttgctgttgccaagataatgaacgttacactcgtgattccacgccttgaagtaaatactgtttggcaagattcaaggtaatctactttgaaacttgtaagttgtctggtgcctgatgaatttggtgatttatgatttggcatttctttacagttctttcacagatatatttgatttggatcactttataagtgtccttaaagacgaggtgcggattgttagggagcttccaatacagtatgcctggagcactcgtgattattacgctacaggtattcgagctactaggattaagactgcgcctgttcacgcttcagcagagtggtatttggaaaatgtcttacctattatccagaggtttgtgctttctaaacctggtgatctatcagatgaataactgcattttaaagtcctggaaaatacgatactacatatgatctggaatgctttatagacaatactaagggagtgttcaatgtagatgttt

SEQ ID NO: 27024 - DNA, 506 bp, Arabidopsis thaliana
gcaaccggaacttgaaggcgtaagaattgtatccttattagaacaacaaaaccaaagcttcatacggactttggctacaccatgaaagctttgatgaagcaagaagaaggttggttagtgttttggagtcgaatatgacttgatgtcatgtgtatgtgataagtgtgtaatttgcatgtattgagcatccatttgtcatcactttagcatcatatcatcactgttttataccatttcacatcatttgtcatcactttgcatgtttaggatagttttgcatgcatgttgcatatttgcgttgatttcaggtgatttggagctgttgacgagctatctggaagaagcggacctgatcatgacaaaccactcgacctggaggtcgagtaggagcttcgagatctcaagagaccactcgaccaccaggtcgagtatgaggacatcaccacttcacttcaccactcgactcgaggtcgagtgccctcatctccatcacgagaccatcactt

SEQ ID NO: 27025 - DNA, 995 bp, Arabidopsis thaliana
ctctttgctacactacacttgaacgaagcttttctctccttctcatctttaaagctccaaaactaagatataaaattctgcatcagaatgtctactctaaacgtttcaaactagtactgagcaattctgcacactcaatcaacgatgtccaaatagatgcccaccttcaatatttgcataaagcaaggaattattacggttcaatgatcccagctcagatctaggcagataattcccatctcgtggcaagctggtggcccgcctatcagaaaatgcagaagtctcaaaagctgatgaaacactcagaagactctgtagactgattactcagatgactctgtagactgattactatgtcaatgatgaagtaactcccatgaaaagtcgctttgatttgtcttctattgatccatttgtcctcaatgagtaggaatcttcacccagccttctaacatcgacctcattttatgttgtttaggatcaatattcaatctatggaatagagattcagcccagtcacctgctagcgatgcatcagctcctgaccagcgtccatccattggttccaactgtgaaaattagtggttcgcctaatggcacaagagtttgatggtggaaacaaggaatacattcttccaatccattagacgattgcacgtgggacgagtaagggccatgcaactccagaccccgaccaagtccaaaaccactgacagcaagtagattcagtcctatcgcagtcatagctaagaagctgaacgctcaaacactgctcgaataatccctgctgcaggttttctgaaacgaaatatcccgctcatattgatccagatgaccctcaaagactctcttagctgctgctaatggaaggctgttagcctgattacagaagggcgtcattggtgattcccaaaatgagttctgagaagctgctcactatggtcagatggccatagaggaacaatatgtctctgttccttcaatagtatattgag

SEQ ID NO: 27026 - DNA, 541 bp, Arabidopsis thaliana columbia
ccttggtctattgtgtgatccaagagctttgtgaaatttgacccttaagtgctacgaacgatctcttaattgagagagtggtcttaaggcaatttgacctatatcaaatttggcgcagttgccgaagttctctacgattcaccattagattaagattagagttttgtctaagcttttgtttttctttttcctttttagttacttatgttttctctcttctttttttcttgtgtatttcaagtgtttgtcaaatcacaaaacaaggaacaagcgagaaacatgaacgagagtaagcttgatgcggtccacaatcaacttgtggaggatgtcgattatgttcggagcagaggttttccgaatcagagatttcatcaccaacaaggctacacaggttcctatgggaatggtccaactaggtacactcagaattctcagttctaacaaccgctacagaatagcaatagtttcagcttcacaaggaactatgatcttgcttcttacgaagcccccccctcttctaccacacctagaagcaagatag

SEQ ID NO: 27027 - DNA, 411 bp, Arabidopsis thaliana columbia
catgtcgctatgacgattgcgggaagaaaccttcttaccactctgatatcccaaaaatatttgcagaatttgggcggctcagatagaccatcaaccatggagttgttgtgcgtacgatggatgcaaaaaattacggtgtgattaaagactttttagaggtttagtatcatggactcataaaatgtgtgtttttcaagtgtcagtggtacgatcctactagggaacgtggtgtgtgacttacaaaatttggcgttacggagattaattcggctagaaagctagataagtatgatccatttgttcttgcatcccaagtcaatcaagtgtgctacattccatatcctagagttaaacgcatctatgatccgaggatcagagctacacagattaatccaagaggaatagtagatg

SEQ ID NO: 27028 - DNA, 656 bp, Arabidopsis thaliana
ccttaaggacctatgtgataagttttcttctctctcttctcctgttttatctttgattaattctttggattattcgaagactgtttcacaagataacaagcctagagttcctggaaagcttgtctctcctgttatttttgcaggtgacaagaagagtgtcgatcgacacacccctgagtgtcgatcgacaccagaagctgctccaaccagatccgtttacacaccgccttggaaggcgaggatgcagcacaatcctcttttatttttgttttatttttcccgctttttctggatttgaatgccactggggacagtgtcgtttaaagtgtgggggaggttcttactaatgatgcttttatttttgtttcttattttgcaattcatttggttatttctttagttgtgttaggaatcatgatctatatttctcttgtttattgcctgattgatgagtgctgcaggttcgagtcaatcagactattggaaaatctagatggcaaaccaacagacttgaggatatcctagtttccaactcaaccacttatgctggagctaatctcactgctcttccttttacctcttcaaacggttagtattcatagatcttgactccttgttcatacgtgatattgagactaatgtgataaaaagatgtg

SEQ ID NO: 27029 - DNA, 808 bp, Arabidopsis thaliana
acatttactaataatgatcgatcaattgatcggtaaaatacgtattgattttttcactaaaacaaaaattttattgattcaaaaaacaacacatagtagaaaattcatttttcattgcgtaattggtttgtttttcatcacaatttaaaattaatttaataagtcaattttattataaatattattactttttgttaagatattcatgaaagtccaaaaataatggatatgatctaagcttccttttctttatcgtttattgttatagaagatcttttaagagagttttcctttattttaatatcctttatgcttatgttatgctaattgccttttgcattagttggagccgcctcttctctatatattctgcgagtcataaaacctaccttaagactaaataaatcttcaagtttgcacaaaaggtaggagaagatggccccaaaccccaccggaaactcacttgacggttcaagttctgactcgtacaacctttttttcaagggttcattggcgggatttggggttgcaatttgcagagaagaggatgatagcatcttgtttcagaaaaaagtttcacttcattactccgacatttcaggttgggagacagagcttatggcattgaagctaggactaaccaaagccgtgagtttggggatcaaactgtgaagaatatgatgacttgaagctcaaggaaggttacaaatgtttaacacaaagatctgttggagcttaacccaggtgaagtaaatcaaccctggttaagtttcttgggacacattcatagtgaccagcaaaaggaaat

SEQ ID NO: 27030 - DNA, 542 bp, Arabidopsis thaliana columbia
ccatactctcttgagtataagcaggggctgaagttgaggcgggagggttttgctcgttctgtccggtcgagtagttggtctagcgtgttgaagctcgtctatgcctacttcctggctctctcaacttggagatcacttcccgaggcttaaaagatgaagttcggggttggtcgattcttttagctctccttgcacctggatagttgcaacatactctttgtagctcaataggtgatccaaaagaacaacactcagcgaagtgtctgctctatcacccgccatcttcctcccatcttttgtctcactcagaatgaagaccaaagattggtctatcatgcatagctcctcttcaccaacaaatccggtggccttctttggaaagagggtgttggcgatgcattgtggagttttgtaacaaaggcctcctctctcttctttctctgaatcatcaacacagaagtgaaccttgagggttgcaaggagttggcagctctcctctttatatccccacattggcagctcatgaatgttcaagattggca

SEQ ID NO: 27031 - DNA, 533 bp, Arabidopsis thaliana
catgtgctaaggctcatcaaatctcctcgatggcatctccataggaggttgtccctgtggaatagcagtggtggaggaggaacaactcaacttatctgttagaaacttgatagtcttgaaacacttggcgagcagcttgtcctgcttcttgcaccacttctgcagtttactgttgttcctaaggggcttcactcaagctcttgctctccctcgttgggggtacatgttcaccaaagtgatacatgctagtgtcgaactccactgctctgtcttcatccatcccatccaacgcagcttcttctagaagatcatcctcatccaatggcagagcgttctcatagtagaggcgtccaacctcaagccgaaaatcaatgtaacctcagggctagggagaaggatgctagctctcctgtctgtagagtgctcaaacctgaacctgtgcaagtcgtcaaccattgcaaactcgaagaattcgaagtgacgtagctgctcgatatccattgctcgcagctcgagtccatcagaagtgattg

SEQ ID NO: 27032 - DNA, 589 bp, Arabidopsis thaliana
ggatgtccgcatcatactcctctaaaaaaggtaccaagaagttgtacctcactgaagccatgatgcgggcagtcccgttgatactccttgaagcgaacccaagcggccttgaaagcttcagctggaccttgtgtgaaggtagacagcttgtttctcagctcctcagacttagcatcatcatagaaattgttcaagaaagctatcttgatgcttctccaagtcttgagggaacctgcctttagttgtttcagcaaagaagcggcttctccatcaagtggataagggaagagcttgcacaataggtagtcctctgagactccattagctttgatgcttagaacgaggacctcaaaacgctcgatatggtccattggttgctcatgagataagccaggcttaagctcatagtcgttcctctgaaagggtgggggtacaatcgctgaacgattagcatagaacatgtctagcctattgaaatcccgagagtacgacgtggttcaaagcttgaggaatagctgcaggaatttggggtttgtgtcgattgacacctccaccacttctacgattaggatggaatcatgctagacaa

SEQ ID NO: 27033 - DNA, 561 bp, Arabidopsis thaliana
tcaagaggatccccagtactccacacttctggccagttcgccggagcaggctttgcgttcccggaatttccctcgttttcactccggcgaaccagcagcggcggaggaggaaaattgtgctcgctctctcttctctccggaagtggcgccggtaaattcagtgtcagagctctagttaggcctgatgataccaacgacgctgactccgtcggcgatgggtttctgtcaaaattccactcggaaatagagaggtaatctcttcaaaaagctatacccttttgatttcattggttgtttcatctggtcaagtttgagacctttagctctatagtagagaagcaaagctcgctgctttagatgtatgtgttgaacattgtttagtgtcttcaaagtttttcatcttttctttctttttgtctactgtgtagattttagttgagactgatctcatggggagacaagcaagttctgcagtcacggtgacagatggagaaactgtaagtgtgctgcttcattcaatttccaaaactttgaactttttttcttagttcctcgagtttg

SEQ ID NO: 27034 - DNA, 967 bp, Arabidopsis thaliana
tcttcacccgacaaaaataattgactatcaatacatcttccaaaaactatatcaattggtataatatcaatgctttcataaatagaaaccttgaataaaaatatatattttcacaacataatacagtatcgtttagatagtagaacataaacataattacccataaaatactaatcttagaaaacctctatctgtttttattttgagtccacaatatatttactgtttttcaacgaatccactttatgttaagttcaacttttaaatttgttagagatcgaccattaattgaacatacatcgatttatgttttttttttataatataatgtaggcccaatggcccagaacatagcctactattattgggcctgtagcctgctttagcatatttaccaattatcacgtgtatgtatgtatgtatcatctgtccagagaaaattgctaataccggcgatgaatcagctgcagcaactccaaaacccaggggaatcgccgccggtgcacccttttgtagcgccgttgtcgtatctattaggaacatggagaggacaaggagaaggtgaatatcctactataccgtctttccgctacggcgaagagatccgtttctcacattccggcaaggtaaccatatcagatctccgattcatttttaaccttaatccaatctgcataccaaaatcgcgatacgcttactctgtcactttgtgtagccggtgatagcgtatacgcaaaagacatggaaattggaatcaggagctccgatgcacgccgagagtggttactttcgtccaagaccagatggttctattgaagtcgtcattgctcagagcacaggtctcgtcgaagtccaggttaacataatccaaatttccattagatccgtgtttaccataagcttccaaaatcattacttatgttttgctgaatctctgatcacagaaaggacatacaatgtagatgac

SEQ ID NO: 27035 - DNA, 1412 bp, Arabidopsis thaliana
  unsure (1)..(1412): unsure at all n locations
ggtttgtgttacgtgtagaacaaattcatggattgggctgaccaaaaattaaacatatcaataaaattaaagggttgggctgactcaaaaaacacataaataataagaacaagtgatcatatataatcaatttagaactccaagtaagatccgtaacttttcacaaagaaagtgagtatatttggtataagaataaccccaatgtattaaaaagaatgaagatatgaaataataaaaataatcaacacacatatggagagaatcagaagaaaaagaattaaaaaataaataaatatgatacaaagttgcaaacaacacaaagatcattgttgtctgtacagctttgtcgactttcatatcaaattgatccctcaaaaaaaatgaaaaaccgagatagctagcgacgaagagagctttgtcataagttcatggattggtcttttgtcaagtcaaaatgtacgtatgtatcttcactgatgagataacatattttcacgtgagggagctttggtcgtcgtgacagagctctttacgaagcttacgagagaagagctgacacgcgtcgacacttagatcaacggcggcagagagagcaacgaagagagctgcgtcggccatgcaagtcacatgctgtgctcccacgtggaccacaggcttgctcactttcccttctccttcgacgctcgaacccatcacgaaccctttcaccggcgatgatattgccggagactctccctggcctgagactctcctgtcaatgctgaactttcctccttgttttgtgctcattgtccctgtccatttatatacattattagattcactaatgatttcatggagtttattagcaaatcatgtataagggtatattggacatttgttataccgtatatccaaatatattcctaagttatatgttaatttgtgtttctcatagtactttagatcaccaatgctaattagaacattatacacattaacacaaactaatatattaacctacctcttgaaggtgcttttgtattttaggtagctttaattattcgtattaccataatgaatgatttggtcggttataagacctgctaattttgatttgacccacattatagtactaattaattatctcaacttataatatatgatttaccttctgcaataggaatgccggtgctagtactgttatccctcacgagctcgaacttgtaacccaatccatcaatagctcctctctcacgccaagcctcaagacgtccccacggtttccaactactgacacaagtcccatgaggcctaaggattagccacgcaccagggtttgatctagaaacacgatcagaccctggagatgcacgaaaggagtgatcattgaagctgctgctacaggtgatcncgaaagatcatggatcgtt

SEQ ID NO: 27036 - DNA, 842 bp, Arabidopsis thaliana
agatgttgaagattcaaaagtttttgagggataggacgaaaagggttataagtaagaggatcggaagaagatcagaaaatatcgaagcgccgagtagtggaggagaaagggtgagagaaaggagaggcagggacgccggtgaattcttgaaccatagctctgaagttagaagtgtcggtggtgagaacagttgtaggagctcttcttgaagctcttgttcgttttctagggtttcgggaagaagagggagatggaggaggaggaggtggtggaggttgaggagggaggagatgagtttggttaagaatgtcgtcggagatgagattgttgacaaagtttagataagtagcggaggaggaggaggaggaagagagggttgttgggtcaccgtagtaggtggaggaagacggtggtggttggaagggtgggaggaagaaagaggagtgatcttgtggagcaccagttgatgaagactcgtgatcatcgctcgaagattgtaagcttccactgttacaagaatccatgtggacatgaaagaaacaagaacataaagacaagaagaagaagagaagggtttattttggtgaatctagggttttgagaaatgaagtgtatgggagaggagaaagagaaagcaaaaagttttttttttttttacttaaagaggttgaagggagaggtatggtgtcgccattgatggagagagatagagaggaggcggtggctggcgaagagtcaaactcaatatgaaagcgaaaacgagagagagagagagacaaatatctctttctttctctagtggggatgttgcgaatgttgaaagatagatagtgttggatttt

SEQ ID NO: 27037 - DNA, 1081 bp, Arabidopsis thaliana
taaaactaatttcaacctttggatttcctcatggtcttcttctttcttctaaaagatcaagactgcctataattccaaatttatctagtttacatatatatcaatataagatgccattacacaaatctaaaaataaaaaatcctctttttgtctacaagatatgatatggaatatcctttaaagataagtcgtcaactaaaattaaaaaaatcctctttttgtctgcctctctgttcgttatgactgtttagattgttggagaaaagaaaaaccttctaattttagcaaagtgccaaaaccattataagtttaaattttctcaacaaacaaaacagctctcctctcctcttctcttcttaattccttgttatcattttcattatcattcggtctccttatttcctccttctgagggtaattgaaagaccgtaccacaatgtctttctagtttctccagaagcaaaagtttccagcaatcatctcgagggctgagaaacaatggctgcaagaagactcaaaggaaaagacagcaaagcagttaccgccatagccattgataaagataagaacagccaacacgctttgaaatgggctgttgagaatatcatcatcgattctccaaactgtatccttctccatgttcaaaccaaactgagtacgtaatggcatcatcatcatcatcatcattgttatcaatccatcaatctaatgaaaactcttgaaacaggatttggggcaggagaaaacacagaagcaccacatgacaaccaagaagaggcgcatcagttcttccttccctttagaggattctgtgctcggaaaggggtcagatatcaacctctctttctccttacaacaatcacatatatatatatatatacacatagctctcaccgacctcattaattatatattttctctcagattatagcaacggaggttcttcttcacgatattgacatctcgagtgcaattgttgactacatcaccaacaattccatttcaaatatagtcattggagcctctgctcgaaattctttcctcaagtctctttctttctctcatataacctaaactgta

SEQ ID NO: 27038 - DNA, 526 bp, Arabidopsis thaliana
aaagaggtcaagagctgccataaaagaccggagctcagaaaaggaaccttcagaccgtggtggtcctccaactttctcagtcatatgaatgatgtcattgaagtctcctgagataatccagggggactctctgtcacctatgtaagctctcagttggttccaaacttggggtcttttagactggtcaggttctccatacaggaaggtagcagaaaaaagcctgccttttgcaactattgttgtatcaatatagtgttgacaggaattaacaacttccaattggatatttgatttccagaataatgcaaggcctccagctccaggggaaagtggtggcccaagaagttagaggcatacccatccagcttagggtctaaaggacgaagtcagagggattcttggtttccataaggaagagaatatcaggagagaccgttttacgaatctctctcagccgctggactgtcatggggttcccaacccacaacagttccaggaaaccattcttaaggaagaggggttgatg

SEQ ID NO: 27039 - DNA, 576 bp, Arabidopsis thaliana columbia
tgatgacttttggtttaaatcttgtttaaatgtacaaagtctcggttaatgctcgattgcagtttggtctaaactctaaacaaatgatttccattcggtttgattctaagaaatttgagtttaatcacacaaaatcccagccgtcggatcttaagaaactctgtaacatagaaagattggtgttaatcctagccgtcggatcaagctttctttgtttaaaccactctttgttttgttactcagtctaaaagcaaatgtggtcaagataaccataaataaagattatgttgatacaaagagagaaaaatagttatgaatctaatagactcagcaatagaaataacaagacaaagcttgagaagcaacaatatcaatgtttgtaacacctaaaacatattattaccataactgaaatgttctctctcaccaaggcaaaccagcagacagagacttgtatatattacttactcggatagagttgctttgagatcacacgtctacttagctccataatgagtacacatcctccaattaactcacctttgtagtatagctgaggaatagttgccagtttga

SEQ ID NO: 27040 - DNA, 636 bp, Arabidopsis thaliana
tcaaatcgaacgacatgagaatgctttgttgaggcaagagaacgataagcttcgagctgagaatatgtctgtacgcgaagctatgagaaaccctatgtgtggtaattgcggcggacctgccgttatcggtgagatctcaatggaagagcaacatctgagaattgaaaactctcgtctcaaagatgagttagaccgagtctgtgccttaaccggtaagtttcttggccggtctaatggttcacatcatataccggactcagcacttgttctcggcgttggtgttggttctggtggatgtaatgttggtggtggtttcactctctcttctccgctgttgcctcaagcttctcctagatttgagatttctaatggaaccggttctggtttggtggctacggttaaccgtcaacaaccggttagtgttagtgattttgatcagagatcgaggtatttggatttagctcttgcggctatggatgagcttgtgaagatggctcagacacgtgagccgctctgggttcgaagctcggattctggttttgaagtgctgaaccaggaagagtacgacacaagtttctctcggtgtgttggccaaaacaagatgggtttgctcagaagctctaaagaactggactg

SEQ ID NO: 27041 - DNA, 445 bp, Arabidopsis thaliana
catccgggtttttagtctccatgaggaataggatgtctggtgagatggtggagtgtatctcacttatccgcctgcctgttgtgggattccccaacccacaacagttccagctcaagatttttaaggaagaggaggtggtggattttgaaaatccacctttttcatcaccatcgcaggtattgggggaggggagcgggtataatcaaaagaagtagaggttctttccaagggaggacgtcttggtctggaagaatctgagcactcccgagggttagactgagatggagttttctctctccattgcagagaataggatggagttagatgtctgggggctcctctgagatgagaagaagttggatgagctttgctatgggatctctcccggtactccactgctctatgaggtctactaggttggaagctttgcctttgggggaaagat

SEQ ID NO: 27042 - DNA, 536 bp, Arabidopsis thaliana
tgcgttggtcccgcctgggactgtttggagccgctcttgcgtttatttttcccattcttgggatggtagaccgcctctacttcgccggatttatattttccgaggatattcagaagatgtttacactcttcagtggaatgtcctccgccggctgttgaggtcggtcttccgaatcgactgcggcgacgatcgttcctcgcttgtttgcctttgggtcatagtgttgacgcggttcttgataatctccccgcgccttttccttggcctttgcgtgttgggatttgctcgccaactttgcgtcttcctcctccaggaaagcatatcgtgaagctctatggagggcgtcatcgagatctcgcggttctcttattgcgaggtcttttctcagcgggatccttggagcagccccttcctaaaagcagccaccgcggcttcgtccgtgatggtaactagacagtatttctttgaaacgacctaggtagtcgttcagtgtctcgccattttcttgagtcatgctccatagatcggaactagag

SEQ ID NO: 27043 - DNA, 575 bp, Arabidopsis thaliana
tcttcgatttcttcttcttctactacttatgataatctctgtaaatttggcagcaaacaaatggagaaatgagtagaaacggagagattatggagtcaaacgtaagtcgtaagagtagtagaggagaagatgtagaaagcagatctgaaagtgataacgctgaagctgtctccggtgacgatttagatacctccgatagacctttaaagaagaagaaacgttaccatcgtcacactcctaaacaaattcaagacctcgaatcgtaaactcactatacacaaaatctccatttacacttctacgaatcgttttgatttttgattttgatgaatcctccatttttagggtttttaaagagtgtgcacatccagacgagaagcaacgtcttgatcttagccgtcgacttaacttagatcctcgtcaagtcaagttctggttccagaatcgtcgtactcagatgaaggtttttagcttcgaatcgctaatctttgttttctggtttctttgttttgatttttgatttgtttttacagactcaaatcgaacgacatgagaatgctttgttgaggcaagag

SEQ ID NO: 27044 - DNA, 571 bp, Arabidopsis thaliana
catccgaccagttgaatgcggtgtcttttccgatcagtcgagtcaagggttgggccatgctcgcaaaactcattacgaaccttcggtaataccccgctagtccgagataacatgaccaagaaaaccaacgctcctttgccaaaatgagcatttacttaacttcgcaaatagctcatgttcccttagctgttccagcaccgcccttagatgttcttggtgagcttcccaagacttcgagtaaaccaggatatcgtccatgaagatgataacaaactcgtctaagacatcccggaataccccattcatcattttcatgaaggctgttggtgcattggtcaatccgaatggcatgaccacaaactcaaagtggccgtaccttgtcaggaaagccgttttcctcacgtctgttggccctgaacccacctgtttcaaccaattccggactaacaaaacaatgtgtagcccagaatcaaatagagtgtgcgttactacgtcacctactctcaaggtccgtcacattccttagaatgtgagtactccctttccatatgatgatgaatgaaatgagtta

SEQ ID NO: 27045 - DNA, 490 bp, Arabidopsis thaliana columbia
tggtcggatcccctgcgaagtgagacggatgcccacgcccgatccttgctttgatgacgagctatctacatgcaatagccaagttgtatcgagcggattctcccgggcctcctttgtgggtagttccgatactcgatggcatattcgatgagctcgatttcccatttagccaggcgtcctgattggcttggattgtgtaagacactgcagagcggcatggatcccattactacaatggaatgggattgaaagtaggaacgcagtttccgagcggacattacgactactagggcgagtttttccatttacgggtagcgatactccgcgctggtgaatgtctgcgagacgtaaaaaatcggtttctgctcgcctctgtcttctcgaactaacactcccctgactgcagtatccgacaatgacaacatataagtagagtggttcccgattacgggttttgcgaggattggtggggtcgcaggtacttcttgag

SEQ ID NO: 27046 - DNA, 477 bp, Arabidopsis thaliana
aaattttcatttgttttgtatgaaatctgtgattttgaattcatggattgtcaggtggagcatgtggtaagagaagaaaagacagtagctgcttatgagctcgttggtatatattgtgaacttcttgttgctcgtttgggtgtcattgactctcaaaagtaagtttctttgaacaacccttgtttgttttttcttcattgtgttgatcattgtttgtgatcttacttcaggacatgtcctaatgatcttaaggaagctgtcgcaagtgtcttatacgcttctcaaaggttaacagatgttggggagctctcagatattgttaagcatttctctgcaaagtatggtaaagattttgtttcagctgctattggtttgcaaccggattctggtgtgagtcgtttggtaagttgttttactgcgtgttctcttactttactccgctgtttgtagaagagagctatgattgtttattgagac

SEQ ID NO: 27047 - DNA, 517 bp, Arabidopsis thaliana
cctcttggacctcatagagttgagcgccatatcgttcccaatagttaaccacaaatccttcaactcttccctctcgaacttgggtttagttcccttttcacttgggaaaccaaacaatccttccaagctccgatagatagctggtaacggtgctcgctcactgaaaaagtcaagaaccgcaacccttcactctccagctcatctgctgtgagtggagagaaactctattgtttccttcttgtaggcgacgtacgggtaagacatcagtgtctccagatgacacttctcaaataagtgatgtacgtcctccagtatccccagctgggctaaagtctgataacaggggtacctcgttccctagaagtcgttcagctctcctctcattgcgtcaagctactaagctttgggtgtcagctctgaaactctcataagcctgttgctctctctccggtctagttgaccaagactcaccttcatcgacgttgtaatccgcatccatagaggactcgccactgta

SEQ ID NO: 27048 - DNA, 351 bp, Arabidopsis thaliana
gtgtgctctaaagcatgatttggtgaaattccaaagccgacagtatagtctggatgatgggaagaactttgctagaaaagccttcttgcaatcatcccagatggtgattgagtcatgtggcagattcttctcccagatgtgtactttgtcgcccaaggagaatggaaacaacgggatcttgaatccgtcttcactgacaccattgatttttgttagtcaaggtggtcaagtggatcttccattggaagaccatggaatttgttcccatgaatcatcgatatgagcgcactcttaatctcgaagttgttgttctggatagcaggaggtgcaatgcctttcctctgacgatgg

SEQ ID NO: 27049 - DNA, 581 bp, Arabidopsis thaliana columbia
gactgaggtggatggagaacacttgcagaagtggtgggaggaagccattgaagaggagttttcgaagtactatagtcggaaggacaagcgagaagaaggacctcctgcttggcaagttccgatgttcgagcccatccacgagaagatacgcattatgaatgaccggatcactgatcttgagacctaattattcaaggaactacgatcaatgaggagtgctattagtatcctccgagctagaggagggcgtggttctcgttgaaccatgtatgaaccatgtgaaccacgttgttttcattatgcaagtatttaattttgaaccatgtgaagcactttgttttaattaatgtatgaaccttctgaaccactttgttttaaatatgcaagtatttatgatttattacgatgtgcaaccaaaatatacagttgaacagggtaatgtgacgaaagatgaaccatttgaactaaactgtttcgaaccagatgaactatctctacacgcacaattcaccggaaaccacgggcttcgtcaccccagatgacactgacactgaacttgaactcatcggagtagttagaga

SEQ ID NO: 27050 - DNA, 642 bp, Arabidopsis thaliana
gccataacataaacaaactcagccgtcatataacagaaactcagtcatcaatgtaaggttaaaccataactcagtcacagcataaaacaaactcagacacagatgaattgataaatcataaatcagtcggcaaacaaacagtaactcagccgtcaaatcaaatagatctaagaaatcggccaccatatgtcaatcaacgacgacgttaaaaccgagctttaaaaaccatcgttaagcatcaaataacgatttcagtgacgggaatcacttgcgattgaacttagatgtcagagtcttgtcggaaaattcgaaataaagtttggaatcatacttaccggaacttagccagaaacaagaaatgcgactccagatgtcggaagtgacttcgcgaaaccagaaattagactccggcgtaagagttcgttccccgtcgagagagaaagaaagagacagtttttttttttttcgccgatgaacagtaagaaactgaaacgtttgtgcgttttgtgatgattaatgacgtggattatgttaatgacatggaatgatgacatgtataatcactgttttttcatttaagttttagttaaaaacgaattaaattataataattaattaacactaattaggggtgttattgta

SEQ ID NO: 27051 - DNA, 951 bp, Arabidopsis thaliana
ttattattattattattattttatagaaagaattatttcattgacaaaaaaaagaagataaagagttatttcaagttacgtacctgacaatgtcgttctttttcaattaaagctagcatgtaacattacatttatatactaatctgtgttttatgaagcttttatctgataatagtcttttttcatggtgtctattagctctgataattttgttgacaaatgaacttgtaaaaaatgttatttccattaatataaattctgcaaaactctttaacttgtcgagtaatgcttcatacataaatgagaaaccgttccgttaaataaaattaagcatgaaattatttagcaataaaagagaaacaaaggaacactgcccaattaaaacaagggcaagttcagaaataagcaaagaattgcgttttgaccagagcacgacttagttttgtagttaaacgaattgtcttcctcgagaagagaaggtttggccaaaccaccaagaagaagggacaacgttcaaaaatgtctgcgttttgctgtccgtcagagtaactttgaaggagagtctctgtccccggagatcaccggagctctgccagttggcaccccaattacgggtcatctgaagccaagtctttccctttgagcctctcaccgctactgatctcaccgagccgccaccaccaacgtttgagatcattaccatattgaagttaccttgccctctcatcgtgaacctcacgcctcctcttcttttgcatcccaccctatatatacacattacaaaactattagatattttgcataaatatcacagtaattacatgctatatttttatttaactaaagtccatttaaacctttttccagattcttttgaaggattggccttgtgtttgtaattattcatcctgtttgtgagcgtacgtatatgtacatgttataatgtgatgt

SEQ ID NO: 27052 - DNA, 577 bp, Arabidopsis thaliana
cacattcttttttttcttatatatatgttacttcatctcatcatttaggcgtctcatactctcttcctaacgacatggtcgttgttcctcacattgacagacagtttctcaaggatgttgaagccgtattcaccgctcgtgctcgcgtgaatctcccagttccaaaccctggcttgggtacatgggttgacagaaccacggatacgtggttcagattcaatcaccaactatctgtcgcgattgcagatatacttcagcgcaactttcactatgcgtggctgacgtaccagatgattctcgttgtttttaaggcaagatggtttttctcctcacggtaagcatcgagtttgttatttaaagcacttctagtaaaccatataccaaaaaattcatactatttgctctctttgtagcgtaaatacatgtgggattcaaggcacactctaacggtgtggacgcagtttaatttggtggctagaacgttgtaccgagacgacaacagtttggaatgatttggttgacatgtttaatgaatttggcccagatgatgtcggtttcatgtcttgagtgcttttgt

SEQ ID NO: 27053 - DNA, 656 bp, Arabidopsis thaliana columbia
ggtaccgagctctattcttaaactggcttctagatttttgcttctgatcatctaaactcgaatcttcttcaacattttgcaattcttgatctatgttgtgttcctaaacagacaatagttacagcaatgccatgataagtttctcagcatcacatagcaatccacaagaacgattattcgtactactaagctaacacatcaagagaaagaggagtaaagttacctcctttgagttggcatcgtcaccaatttgatttgattcagctcgagcaacggccgtgataactctccggttaacagaaatcggagtaaagcgagaatgagacaacaatggtttcgggtacttttcagagaattgaggaagaattagatatttccttggagaggaacggcaagggcatgtacagagagagctcaatgaaagcggtaatggcttatacctacagacttcaacaaaaggcgccattggaatccggtaatcggaaagaagaagaattcaaaatcctaaaatttggataaaggacaaatctttacgataacggaatcatggaaggaagagattttgaagattgtgtgattcggtgaatctaatcggagcttatacgttttgtacggtggagatgctaatggtggaccttggtggtacgacgagagag

SEQ ID NO: 27054 - DNA, 1200 bp, Arabidopsis thaliana
caagaacctgaattcgcatcaaggtggtggggagacagaaatcgggaaagtatctgcgaacgaggttgacattaggcgaaaggatcttctgccggtatatgataattttcacagtgtgtataccagtatgcgcaacaggtaagttacctcgctaactgcatcacatcttataaactgcgtctgtcattgatccaattttgaagtggttcttctttgcttgtagaggattttctggggaaagagattcagattcttcttcttcttctgaccctggacaagttaaagaaatgcatccattcaatggtaatcaaatttactttcttaatccatgcattataagatatgtcaaatcttaaaactgaagttttagcaggtatggtttaccccgaagatgaggaaagaagagggagtgcccattttgcactaactccaaaccaaaatcctcataccggaattgtaacatttaaacagcctgtagtttccatttcttctgctgtgaaagacactgattatatagacgacgacgctcatgtcttgccaaagaacgcctccctgcccgctgaaacaaaaattgaaaacagcagtgggataagtggagattcaaatgtaagttctaaccgttctgatatgagcatgaatgcagcagacgagggtgaaggacccattgacggctcccaaacttcgagcagtttttcgaggaggtggtctccaatgaaactgttacagaaactgagcataaggatgctccatctgatggaaaactcgatgatgatgaggacgatgacatgcttggtggtgttttcgctttctccgaagaaggtaagaagaatacatcccatagcctgtaatttttttcgatgatttgaatcctcttctaacggtattatctcaatatatcatcaacatttttggatgtgttacaggttgagtttagttaaactatggccaaagaaagctctaatggagaaggggtcacatactaatcccgtttgctgcaacttttactcactgatgatctttaataccctgaaaaaataacatttaaaatcaatttcttttatcatctgtttctgtaaatgcttgtaaatgtaatgttcattatcaacagtctctcgatttccatggactgtttctttgtaatctttttttttcgtgtaactctctctattcattcatcaaaaaaaaaagagaaaaaaagga

SEQ ID NO: 27055 - DNA, 1445 bp, Arabidopsis thaliana
ggatttggaaaacagaataaaataaataccagctgcgtggtttgaagacccgtatgggatggagttttgaaactgatgtcaagacggacagattttgcaattgccaagtttccagtgtttgttggcaaagagtttgctgctgcagagtcttcaaatccaaccatttcagtgttaccattgctatcctggtcaacggtgatacagtctggaccatcttttggtgactgtatactgcatatcagatcacaagggacttccacaacaagcatgataattggtatctacacaagcataaagggatcatatcaacaaaagcatgataagtactagcaatcgtggataaagaaaaacatcaataagtgacgcattacagctgtgttttcaactgtcttcagggagtcagtttttacccactcttgattcgcgagatacctggctgcatgctgaatagcaaaaacatgtagcaaagtggattcagttataaaatgcagcacgtgaactgtcagatataggactcttatttacttaacaggataaaaacagttctaagaaagaaaaagaagtagagttgaatgtcggctcaagcattattcaaattagtaaattacaatgcttacacaatactaaagcaattctcgttacctcatatataacatgacctgagcaaccacatattaagaaaaatagaaccatatatggaataattagactagcgcctaatacaaaaatatacaagcacgtattcatcatcaaaataaagtaaatgtaaaacttaagaacagaatcttgattgtatactactacccatttcaagagtaacgaaatatagattttaagaacaagatctgccaagcccaaagacattcaacagttgcaacatgacttgcgccactaaccatacctgaaggcaagtctcctttataccattgcgaccctccaaaattcctgcctctttgataggttcctgaggcgggtattatatatcagatcttccagttcaacaagtaatgcacacgaggaatgattttgggtttgcttactaaatttctcactggaggaagacaaaccacaagatccacatcactagaagggagagacaaaccagttgcagatgaaccaaatatgttcgtcctagacctgggccacagaacttggagagatcgggtaacccgcttgattgcccaattgatataaggtttgcgggccatattctctgcagcaaccttcgcgagcagtatataattcaaaggattagaagaaacgccatcccaagaaaagtaaatacacacttcaaagatgctcatatagttctctgcaaactaaaggcagttactaaagcatatggagaaaaaaaagaggtattgtgattactgcttgcagaaagaatctatctcgtcattaagaatacagtggatcagtgagagagattcccttgcattggacag

SEQ ID NO: 27056 - DNA, 592 bp, Arabidopsis thaliana
gtgaatgctaagctggattcggttcacaacttgcttacaggaaagaagcatgtccactttgcagctgagaaagcgactattgagcctgagcctgagtcagaagaaggagttttctacatcgatggtcagggctacaagaagtttgggcagccacaaggcaacttcaatggcaacaggtttacagggaaccagagttcccccaactacactcccaagccggctttccagaaaacttttcctcagagcaactttcagaggacctatggcaattcagcttaccaagccctcccccctccaccctcatcaaagacaagaatggaatctatgcttgagcagattctagagagccaaacaaagctcgttgtgtagtttaatgacaagtttgatgctgtctgagctttcacttgaagaagctggatgtacaggtagctcaaactacacaattaatcaagagacaagatggctttcttcctggtaatcgtgatgctaacccaaggaagagctgcaatgccatcttgataagagaaggagatgatgtgtgggaagaattggaccctgaagaccagctggagctcgtagttgtagaggaggt

SEQ ID NO: 27057 - DNA, 559 bp, Arabidopsis thaliana
gaacaatacttcaacgacccaagaacagtgggatttgatgaaaggaatgatggcgcaactagccacattaaccaaggccgttgtagcggatctggtggtttaaagggtggataaccaacaggatgatgactcagaagttgtggatgtgaatcatgagcgaaaaaggggagactatctgagccttctcgaacatgtctcaaggctaggcacgagacatttcatggggaatacgaatacgattgtggccgatgagtggaggagtagactcaagaggaaattcaagtctactcgctgccctgaggattaccaaagggacattgcagtccacttccttgaaggagacgcccataattggtggttaagcgtcaaaaaatgcagaggggacgaggtccggtcctttgcggatttcgaagacgagtttaacaagaagtactttccaccggaggcttgggataggcttgaatgtgcgtactcgacctagttcaagggaacgcacggtacgtgaatatgatgaggagtttaccgccttagcgttatgtgggcgcaacttgaggaggac

SEQ ID NO: 27058 - DNA, 997 bp, Arabidopsis thaliana
caccctgagccgtgtggcacagcgacaaaagttcaccatgttccaatcaggctttcgtctttcccattgcagtcattggtactatcaaagctgcccggcccattggtagctctcttcctctcccgcaaattctctcgccacacaatttcttccgccaccgccctctctctatctaaatctcggttcctcggagtgcctctcgatgatctcccaacactcgccgaggctccctctctgtgattcttgcccttccaaatcgcttaatccccattttctacctgacccgcctcctgtctcgctcccaccttctgatcctgcattgacttccctcaccatatcccttcttctgtaatcaggagagttcttgtgagtggctggtgaccctaaccgactccgagtctctgcaggactatccaagctactcccatctcccaagctcctccgatcatcccttgttctgataaatggtggcccactcccacttctactgttttgaccgcttggtgcgtttgggtcaaacgtttgcgaagctaagtatgttagagctgtcaccacgtcgccaatcagtggtcttgtcgctgcttgttcctgtaaacacattgctgcaactgcaagtgcttgatatagaccacgcattggataccgcccttgcagcgatggatccgccatcttcggaaactttctacgatctttgaacaacggcctagcctgtatagccaagcaaagaccaacaagtgacagagaacccccaaaacagttcaagtcagtaaagacgttttcagatcccaaacattgactatatcacatgagagcgcaaaaaaaattgtgatttttcccttttggtgatataagaaaaagttgagtaacatacccatgcgacaaggttgtgctctccgggtgctcgagcattatcaatagcttttcgacccgtgatgagctcgagaaacacaaccccaaagctataaacatcggatttcaatgtgagttgccctgtcat

SEQ ID NO: 27059 - DNA, 585 bp, Arabidopsis thaliana
cgttcaagcatttggtcaatgaatggtaaaggaaaatgatctttcctagatgcagcgttcaacttcctataatctatgcacattctatgaccagttatagttctagtagggatcagttcatctttttcatttttgacaacagtcattccaccctttttagggacgcaatgcactggagaaacccaagtactatcagagatagggtagataacaccagcatcaagcagtttcaaaatttcttttttcactacttctttcaaattgggatttaacctcctctgtggttcaatgctggaataggattcgttttcaagatggttcaaatttcccttaatgtcggataacgaataaccaattgctctcctatactttctaagctcagataatagcaggttcacttcatcactatttaactcagcattaatgatcacagggtaagtagagtttggaccaaggaacgcgtaccttagaccttttggaagcggtttgagatcacctttggtgccttaagttcagaccagtcatctgaagttggaatgatcggcccctaggttcgtcggtagcaaggtcgagtggttgcttgag

SEQ ID NO: 27060 - DNA, 537 bp, Arabidopsis thaliana
tggagatgcaccacggggccacagtcagaggaaaggaattgcacctcctgctatccagaacaacaacttcgagattaagagtggtctcatcttgatgattcaggggaataaattccatggtctgccaatggaggatccactcgaccacttggatgaatttgataggctctacaacctaacaaaaatcaatggtgtcagtgaagacggattcaagctctgtttgtttccattctccttgggcgataaagcacacatctgggaaaagaatctgccccatgactcaatcaccacctgggatgattgcaagaaggctcatttctgagtggcttttcacagaagactggtgaaagcttctgtgaagcatgggagcgtttcaagggttacaccaaccaatgccctcatcatggcttcaagaaagcttctctgcttagcactttatacagaggagttctacacggatcagaatgcttctggataccgccagcaatgagaattttcagaacaaagatgttgaagaagggtgggaattggttgaaa

SEQ ID NO: 27061 - DNA, 652 bp, Arabidopsis thaliana
atcacaaacaaagccatttccaagatacattcccttttcgtgatcgactagcttatctgcatcaatcttgacagcgaagccatttccaagttcttgcgcatgttaggcacatgaaccacgttggttagaatcagctcacgtacagatggtgagctttaagatgactttcccgtcaccttcaatctttgatgtggcggaggcatatgtgcctagtagcattggtatcgaaccaccaagtcatgggatggctttcagcgacgttggcttcagtgccgacagcacacatgtcttcttgagttaggttagcttcattcttatttgaatccttcttactgcgacattcaaaagacttgtggccctccttgccaaacttgtaacacgttccggtgaacttgcttgtgttctctccggactttttttttaacttttgagtattctgcggaccaaccttccctttccccttgttctgccacttttcttttggcgtgttgtgctctgccacatttgcattggggtcaacaatctgcacaccaactcgcatttattttctattcgttgactcgatgtggagtctaacaatgaggtctttgagactcatcctctttctcttcagcttgaggtaatttttgaagtcgttcaagcctggaggaag

SEQ ID NO: 27062 - DNA, 592 bp, Arabidopsis thaliana
gaggaagccgatccggtgctgttactgcaagtgagattctctatcagagcggtacatcagctgaatatctcgtgttaaagttaccattgctcgatgcatttaaagccatctggtatctccaatcgacttctttgaagaaggtaccaagaagttgtacctcactgaagtcatgatgcgggcagtcccgttgatactccttgaagcaaactcagacttagcatcatcatagaaattgttcaagaaagctatcttgatgcttcttcaagtcttgagggaacctgctttaagttgtttcatccaagaagcggattctccagcaagtgaataagggaagagctggcacagtaggtagtcctctgagattccattagctttgatgctcggaacgaggtcctcaaaacgctcgatatggtccattggctgctcatgaaacaatccatggaaaggatgctagcctactaaagcaaaatagccatgcttcagctcatagtcgttcctctggaagggtgggggtcaatcgctgaacgattagcatagaacaggtcaggcctgttgaaatcccaagagtatgacgtggttcgcacctgaagga

SEQ ID NO: 27063 - DNA, 943 bp, Arabidopsis thaliana
attgaaagatctgtgtgacgctgggtatcaacagaaagtatcagagttgtgtccacaggtagcagctgtgtacacaacaggagaactgaatgtagaaagaaataagctaagaatgaagatgacgtggcgtgtttctattggagacgtgatgtttcctttagtggtggctcagatactttcggatcaaagaaaaaagattgcgagaatatttggagcttagggttttgtcttgagtatatatagatggttgtcgtgacaaaaagaggttgcgcgtctatgatatagttgagagagatgcacacatgtgtgtggcgtcgccccaccaaatacagatgatgatctgttggtggtattcctttggaatctgcagccgttagagaagacggtgatgcaccggtgctgccgggtggtagtcaagacatgcgtggcttgatactgtttccaaagtccatctagaaaagagtggtaagcatagttatgctgtaatatcatatgcaattgtatttgcaatcttgttctagtggaattgttctggactaggtcccggggatgtaggttgttaccgaaccccgttaacaaatctctgtgtcatttactttatgcacacgtacaagttctttacacactctcatcattaacgacgtattagatctagttagtaatttcacatataaccttagccattgtacccataaagaatttgatgatagcagtctccaaataagtttaaggcaactaactttgtttgcttcttctagtgagcgaagccccagccctccttcttctttaggtacacaaacatccctccaagaaactttagctttttttgaatttaactcagggcagaccatagaaaagcagagcatagactgtcaatttctttgatgcaagcactcggtaatctaaaagcagacatccaaaagtttgtaaggctatggatcac

SEQ ID NO: 27064 - DNA, 506 bp, Arabidopsis thaliana
cttccttaaacctcaaataatgcaataatccctttcgcaaagccgacagagccgactgttgtgagatccttgggagctttgaaagcacgttttaaatttggtgatgaaagcccgaagtgtctcattcggcctttgagacaaattccagagatcggtatccgaaatgctcttatccatcagaattgagtattgttttaaaaatactgccgatagttcgttgaaattactgatcgatcctagttccaactaagtgaaccacatcagggcttgcccagacagattttcagagaaaagtttttaatatcctgcgtttagatcaactcgaccagcggctattagaaaagctgcgagatagcctttcggatcttccaaaccattatatggttctaagttgagttttcgagaatctctgattctcaaactcgcaattcgcagggtgaacggtgttcgcctagcctcctcgataacccggttgatatcggctccgagcttgtagcttggtggaa

SEQ ID NO: 27065 - DNA, 981 bp, Arabidopsis thaliana
caaacttacacttctatatgccattgggttcataattgattaaatgataagacaagaataagaaaaacgtacggaaacaaagcagtctgagtagaggagacgaaggagcttaggagcaatacttttatcgttcttgtaaaatatctcaacttggtgcctcacaaaattctctgcattctcgcaagtgttgtaaactttatagtaatgccacgtcagcttctgcatcgacggtcccatcacgatcgcttctgccgtctccgggaagagactgacgcctccaaccaccatcacggtgaggaagatatgaatcataaccatctcaaggtgaagctgttgactgttgagtgttgaatagagaagccaaagaggtgtgtttttgagtactactagtgagggtttatatacgtagagattgatagattgtgagggcacttatgggtttttgtccacgtggcatatctgactaggattaattcttaagtatatagtaaggtccttaaaattaaattgaaatacaaagttgtgcaagcataattatcggatcttgttgagtttcgtttatgtgccgtgcaagctaagtggccagcccaatgtcgtctaggcatttaattgctgtgtctactttttgattttttttgaactactaatttgcatgaaagtaaaaataggttttagataaagacgatgatttgataattgaaatacatagaatcctttttaatagcattttagtgaaaatttgaaatggaactaaattcagattggggtttatagataaaggtcttacatttttatttttttttgggcaaaggagatcttacatatgtgacatactgacatgtaagaagcaaaggtcaaaagagaaaataattgttatcacgattgaagtttgagatatagaaatactaaatttttttaaaactaatattcttcgtgtaatttattgaaatatcaactaattaagcaaatgtacagtatatc

SEQ ID NO: 27066 - DNA, 1566 bp, Arabidopsis thaliana
ggatgatacagaccgtgctacaacaaaggagttgacacagaatgcaacaagagttatgcagacatcaacaaaggtgttgagcaacagaggtattgagcaacagatattgtaaagagctatgtgattgtgaagctggagtatcaatagaaagtatcagagttgtgtttcacaggtagcagctgtgtaacacagtaggcgaactgaacgcagaaagaatcaagtgaggaatgaagatgacatggcatgattctattggagacgtgatgtttcctttagtggtagtccagatactttcgaatcaaggcaaaaagattgcgagaatatttggaccctagggttttgtcttgattatatatagatggttgccgtgacataaaaaggttgcgcgtgtatggtatagtggagagagatgcacacacttgtgtgtggcttcgcccaccaaatacagatgatgatctgttggtggtattcctttggaatctgcagccgttagagaagacggtgatgcattggtgctgctcggtggtagtcaagacatgcgtggcttgatactgtttccaaagtccatatagaaaagagtggtaggcatagttatgctgtaatatcatatgcaattgtatttgcgatcttgttctagtggagttatttctggattaggtcccggggatgtaggttgttaccaaacctcgttaacaaatctctgtgtcatttactttatgcacacatacaagtcttttatacactctcatcatataacgacgtatagacctagcacacagttagtaacttcacaaagtaggtttttttgggatccttttccaattttatctattgtttgtgccgcagtttcaagccatttcgggtttagatgaggtggaattgtgcagtgctgtaaagagggatttgaagaaccaaaagagggagggagagaggaggcgtaaggaagaagaaaaggcaaaaggaagtgagcgctcattagaaagttttagtttgtttcttcttcttatcacttgcgtatgttttcgagatgactagcttatccacatcaatcttgaaagcaaatctgtgcttgctcaggagagaaccagagactaaattcttgcgcatgtcaggcacataaaccacgtcggtcagaatcagctcacatccataggtgagctttaagacgactttcccgtagccttcaatcattgacgtggctgagttccccatgaagagctcctcatcactcttattctttacgtagctagaaaacatcaacctgtcgaggcatatgtgcctagtggcgccagtatcgaaccaccaagtcttaggatgactttcagcaacgttggcttcagtgacgacagcacacatgtcttcttcagttactttatcttcattcttatttgaagccttcttcttgcgacattcaaaagacttgtggccctccttaccacacttgtaacaagacttctttttaaacttttgagttttttgcggaccaaccttccctttccccttgttctgccactttttttggttcggcgttttgagctctgccacttttcttcgttcggcgttttg

SEQ ID NO: 27067 - DNA, 834 bp, Arabidopsis thaliana
catacatatgtattcatttctaatcttgaattttcgtttactcgaacattacatcattcaaccgaattataactttaaatcagcaaatacaacacagaaatgaattacagaggtaacgtaattaagtaagtagctttacgaattatgaatccaacgtcaaatgagaagacattattcccatcgaaatattcttctttttcaaagaaatatgaaacactctaacgaaacaagcgggttctctaacaattcctctgtggtataaccgtaattctgatgctgttgctgatccaacccgtttttagccggatctagtctaacccgacccggagactgattattcttcctagtctttgccccacccacccgactactctgattcgaatccatcaccgatctattcgtcgccggcgatcttgaccttcttccggatctctcacccgggtctctcacacccgacccgtatctcgctccattacatgtaccattgtttctcttacgtggagattgatcagttctccgggtcggataattattaccggtgacctgggtccgagttttcgccggagatctctgagatttcctctgtttcatcatcacatgttcctcatcgtaaccattcatcacaaccgttgaagacacactctcgctcaaactcaagctacaaatctccgaaacctcagagccttcttcaggatcaaccgaaccgggtcggatcaaaaccgggtctgaagccattttctaagaaatcgggtttgttctcctcatcttatcggatcttggtcttcattgggtctatgaacgtcgaagtgcggaaactagaggaaggagtgaaca

SEQ ID NO: 27068 - DNA, 514 bp, Arabidopsis thaliana
aacgttaccctctttctccgttgctataaaataaggctagtgtaaagacaatgtgcttgaaacttggattcatttatttactttctagaaacgtaccaaaaatctttcactttcaaaccttcatactaaccgtaagggagtcaatttgctccaattgtccccaaacacattctcgcatccaaagaacacaacattgttcctatatctatatagtttaaaaaccgcgtatgccaattcaacgactatcataatcccaagaatctcaaacttgagaaaatattcgttgaagtttatgtgttcaacacagttatttcattgtatcattcgctcaaggtaccgctgactagtctatctctctttttgcgaatcaagtcgacaattggttcgctgctcaaaccatctcgggaagaaggtcgaggagaatcacagcaaggagatcgatctcttcgaggagagcgaccactacggccctcacgacgaggtgtaaatctgaaagtgccggtgaacctagccc

SEQ ID NO: 27069 - DNA, 471 bp, Arabidopsis thaliana
tcatctcacaacatccaaacaccattaaacattcttaaaggagtcccaacacatcctagagttgttggtcggaaagggggtgctacctcccggtccaacggttcgatggagtgtagaggatggggagggtagaccgttcgtcttaaagacgaatcggatctggtagaccgatcgttggatcagatcggtcagaccgatcgtcagatggatcggatcggccagacggatcggacaaacagatcgtcgaacgggtcagatgggacaggccgatgatctgatggagcgggtcggacagaccgatcgtcggatgggatggatcgagaaaagtgttcaaggaagcacaaggataagtgcatccatcacacccaagggtcgcccatggatgcaatcttaccggtaaagggagaaagcaccaagaatgggtaaggaacgtgattcaccatataggataacatcgcggccgcttcatgt

SEQ ID NO: 27070 - DNA, 492 bp, Arabidopsis thaliana
agccatttccttcattagcacctattcatgctttagccttgtagcttttagtttttggatgcacttagcctttggtagcttcttaacagcattaccggtgggatgattaacctttagccgtttctgaacacacctatttatattgttagtgttagtgtctaaacagtaatagtacgcatcattgattgtctatctaattcaataggtgttacattaaacgttgtagcctttcagctttaccggacaagatcatgtggtaccgaaccagaccgaccggtctagaagctttcgattttcatataaataacgtatttccccatgaattttacaagtttcaatgacaacaaaagtggcggcaaattctgctgcttacgaagccatagttcgagcaggtcctcgtgtaaagcaacttcaacaagttcatgctcacctcattgtcacgggttatggtcgtagccggagtctcttgacaaagctcattactttagcttg

SEQ ID NO: 27071 - DNA, 977 bp, Arabidopsis thaliana
cactgactttacacacacatgcataattgcatcaagaacacagtatgggaacaagcaacatctaaagtaattgtgaaggtgttggagggaaagtatgtgaacgggatgtccggaccacgtgctgtagatatcccagatatcgttttaggtgagctgaaagtttcagtctcgtatatgaagtcaggttatgccaagagagcagcaataatgaaaactagaggaagtgatgaagacaactacaagatcttgtcaggatatatgcacttgctgcaaactcaaaacccaggcactaagtataagttacaatatactgagggtttagaatgaaagaaacagttcaagtatttattctttgcccttggagcgtgcattgcagggattaagtacatgaggaaggtggttcttgtcgatggtactaccatcaaacataagttcaaaggagttctcttaacacctagcatgcaggatgccaacttcatggtgtttccaattttgttgggtattgttgatagcgaaagtgaaccagctttgacctaattttttaggcagctgagtgccattatgccggatgctaaagatttggtcatagtttcagatagacatacttcaatatatgttgggattaggcaggtgtatccaaaagtttttcatggggcatgtgctgtgcacatagaaagaaatgtcagagtcaagtttccaaagaaaggggtgtctaaccttgtaagtaaagcatgtagagccttcaatgaaactgatttcagggcctttaatacagagatatggaggcgcaacagtgggtgtgccgattatttggctagaataccaaaagaacactggacacaagcgtactgtgaagcaaaacggtacaatctcatgagcagcaacattgttgaggcattaaatttagctttggggaagattattgacttgcccatagtgacattggtggaaggaataagaccgaaattgatgaagtg

SEQ ID NO: 27072 - DNA, 861 bp, Arabidopsis thaliana columbia
actcgatcccgagctattaaacaacaaactgtaaatgataaagctgcaagtgtgaaaagtttaccagcccaatctaaacacgattcactcaaaggacgtgattcggtgaagaactcctcgaagtgttgaggattgaagtaggaaggacagcaagacgacttcgtttttcagttaaaaccgcttctagttcggatctttcctgttctttggagaaatcctctttgtgggttttgtctagtaagagcaagtttggtcttttctggcttttgacgccgacttagccaattcagcatctcgaagattggtgattgctttgtacttggcctttagtttggtaagctgattgtttgagttataagcagccgtttctgactcagagagtctatctcgggtaaccgagagttcgtcctaagtttgtcgtgtctttgatactgcaactcaccgtttgatttcatgagctcggaagagagatggtcaactcggtcttccaacttttgcttagaatcagagagggagcgaaggtcggcttcgagggaagaaaatttcccttccaagcatcgatgtcctgctccctactaagcaatagtccttcataatgttcgaccatgtcattaagttcgttattcacctcaacggaagatgtaaactcaagagagtaagttagcaagtaaaagaatagcaagatcagaagaagtggaaacaaagctaaccctcgagatgaatggtgagcatggagtaaaaagcgttcgcggattgcaggacgccatctgtcaaaggttggcaggctcgcatcttcccaggttttgaagcatcagaaaacgttaccctctttctccgttgctataaaatagggagtgaaag

SEQ ID NO: 27073 - DNA, 932 bp, Arabidopsis thaliana
atattatcacagaaacgggtttgcttggagtctggcctgcatcacatcctttggaacagaaccataagcttgctttagcttttggtgacacgatctcggatccttctcggtatcgtcgtcttgttggcagacttatatacctcggcaccacacgtcctgagttgtcttatgcaattcacatgctttcccaattcatgagtgatcctaaagccgatcatatggaagctgctctcagggtcgttcgttatctaaaatcaagtccaggtcaaggtattcttttacgctccaatacacctttggtactcactggttggtgtgactcaggttttgattcttgtccgattacacaaaggtctctaacgggttggtttattcaactgggaggctctccgatctcttggaaaaccaagaaacatgatgtggtttctagatcctcagctgaagcagagtatcgtgctatggccgacaccgttagcgagcttctttggctgcgggctcttcttccagctttaggtatctcgtgtaatgaacccatcatgttgtattctgatagtctttcggctattagtctagctgccaatcctgtttatcatgcacgtacaaagcatgttggtcgcgacgtacacttcgttcgtgatgaaattatacgaggtaccattgccaccaaacacgtctccacgacatctcaactagcagacattatgactaaagcattgggtcgtcgtgagtttgacgcttttcttctcaagctgggtatttgtaatctccatactccagtttgcgggggggtattgggctatgaggcctctcccgagcccacttagattgtatagctacactaggttaaatcatgttgttgtatataaggcattgcctctcttacgtatcaacatgaaacgtctttttacatcttcatctcctttttgacaaga

SEQ ID NO: 27074 - DNA, 630 bp, Arabidopsis thaliana
acatggactatctctttggtaacaggatctttgtagacgcatctaaccttcagcaaagacaaagattcagattccccagacccattgtcgcagcacggaatttctagaagcaccaggaagtccctttcttcttcagcgtacatgtctaccacatcgattgtggcggttcttgcatcaggtgctatacggcttctgtagcttcctgcttttatagaggatattttcaggccctgctcatgaatgcactcgatttcaacaacttgttcaagaatcacgacgctgagaagccctccaatgcattgcgcaaaagcatcctgaatcacagtctctgtttcgatgaacgaaaacgtgccactagagacttcagaaattgtgtgcattagctcagcatcgtgatctgagccaaacccaaaggatatgaattgggaatccaggcatagaactagggaagcaaagactcgtaatctgttctcagacggaccccagcatgagaaaaggtaaagttgtcctgtcgatcagacaacagcatcatcccggaaacagggttcttcaccgtctaccctcaatcactctcgcaccaatcttgagccccgctggaatgtttgtcccgccgtcagcaaccaaggagtt

SEQ ID NO: 27075 - DNA, 2641 bp, Arabidopsis thaliana
ctcctccatgcttcacgttatgaacataacaaatacatccaaaaatgcgaatatgctgcagtggtggaggccgattatatatgagctcaaatggtgtctttcccttaagtaatggagttggagttctgttaatgagatatgctgcagtaagagcacaataactccaaaactcaataggtaaaccagactgaaatcggagagcacgagcaacattaaggatatggcggtgtttgcgttcaacgcgaccattttgttgaggagtacctacacaagaagtttcatgtatgattcctttttgtgcaaagaaatccgagagacaaataaactcagaaccattatcacttcggataatcttgatgttggtagtgtattgtcgttctactagagcgatgaagtttttgagatgctttggagcttcttgtttcgatggtaagaggtataaccatactgctcgagaataatcatcaactagagtaagaaaataacgagagccgcatattgaagtggttctatacggaccccagagatcacaatgcactaattcaaaagcaaaactcgtcttattactgctcaaaggaaaaggatctctagtctgtttagcttgaatacagatttcgcaagtctttgaatcaaaagtactactagtaacatcagaaaaaggtaacaaatgcaaagccttcgaggatggatgtcctaaacgttggtgccataactgtgaagacggcaaagccttactagtcaccgcagctgctgtttccactcctcggaaaaaatataagccattcagctctctacctgctccaatcagcatcagagtggtgcggtcctggacaatgcaaactttgtcagtgatctgaaaaatgcagcgacgtgttctagtcagttgtgaaacggagatgagatggcagtgaagaccatcaacaaacagaacatcttgaagatctaaagaagagcctaactgaacactgccttgttttgtagcggttgtaaaacgtccatcaggaagtttaatcaaaacaggaggcatatcacaaacattacggagaaatgcaagagaaccagtcatatgatttgtggctccagaatcaattatccaagattcaagaaaatacttaccagactgatgatcatttgaggtagatttccgttcctcaagaatcgtttgtaaaattttccattgtgaatcattcagcccactaagtcctatgcgatcatctgatgtcaatggagaagtgagcgatgaattcgtaacaacattggcagccattccagaagaagcgacatgattaatagaagatccacgaccatgactctgttttcctttgaacgaacttaaaccaccacgtgaagaagatgcagtgtttttaagacgcaatttttcttcgagccaaggaggatacccgattaatttgaaacattgttcggcgagatgaccaacacggccacaattactacagactctgttttctgaagaatctcgaggtcgtgaagtagtttggaccgcgaagctaacaccgtcaaccctctcgttatgtaagcgactcaaggatttggattcttcgtcttgtgtcaaagcattgtaagcttcctcgagagaaggtagtggcactcgagagagaagagccgacttgacagctccgtacacagattcatcaagtcccataagaaactgatgcaatttgtcttcttcacgttcttttctgacgtcgtccatggttttagcttgttggtaatccgccaagctacaccacagttgagagagacggccgtagtaagtttcaatggccactcctttttgacgacaggttgctaactctgttttgagtcgctgaacatgttgtccattcttgacaccaaagcgtttctgaatgtgtgtccagagctcatgagaatcgtcgagatgagacatagatgtggaaacagtttcatcgatggtgagcttcatccatgaaaccacaagagcattgttggcagtccaatcttcgaaatcgggatctgtctcaactggttgtggaatagatccatcagcaaacccaaatttctttctagcttttaacgccaaacgaagatttgtggcccattcgtcgtagttgggtccacgaagcaacggtttggagatgagagttccgggattatcaccggatgtgagatcatatggcgagattgtacgccttgtttcagtcctagctggtgtggtggagctagcgagagccaattcagtactcatgatgaacggagagtttgatgcaagtattaagtagagaagttagaaggaataagaaagcgatctcttatagcggaaggagagatcacagaatcgatcacaaaaaccttttagtagttaggtattgtgctctgataccatgtcaagaatcaatcgaggttgtgaaaagaagattcttattgattacggcaagaggcaatgcctttatatacacgataagtttagacctagttaatctatacaatataaatgggctaaggccacacagcccaacactcctcccacaccgaacatgcaacccaagcgcacctccctatgccaacctttttcgacctaggcactggtaccaattcaaaagaaatatatcaaacgtactaacttatgtttagaaaactagctcaaaaacaaaacaccaaa

SEQ ID NO: 27076 - DNA, 519 bp, Arabidopsis thaliana
tgattaagttaggaacatgtctagttggcagctctcgatcatggcagatagtgatcgcgttaacagttgcatactccttttgattctgtatgggcttccctggaagtcctgtaactttgggcgcagaggtagatgctgattggccttccaaatatctgactttggtattcaatgcctccactttggcattcaggtcattgtacctgcagtccattgagctagatgcttgttcttgtagcagctgttgtgccatttgtttcatgttagcgtcaggagcgggaggaccttggtgttgttgaggtgcaaacctaggtggtggttgctgctggtagttccctgaaattgctgcttggaaacaaaatcttgcttgtagggaacaaaaggtttgttatgaccttgttgtcgttgtggaggatacacttgatcctgaggattagcaatgttggtgctgcgataagagaggttggggttgttagtcttgaagttgttgtacctttgtagcactttgattattgatgt

SEQ ID NO: 27077 - DNA, 734 bp, Arabidopsis thaliana
cgtgaatcaaatggtctaggaaaactatcataatgttacaaacttacaataatgttatataggttaaagaattacaacaatgtaaatgtcaaaattgaggaaaactgaaagttttattgataactttttggaataaatatgaaagactatcatcatccatcaggccgaagaagtcttttcagctgaaacagaggattcgcccagatactcagaacgaagctgcataagcagtcgaccaagatagttaagcccttctccttcacggccacctccccagaatagatcgtgcggtgaagcctccacgagaactgttccaattgtcgagagcaacattgatttcaagtgaggataagttgagaacttgcattttaaagccttgtacattacttctatcttcacatcttcccaatcattccgaacctaaaacaatcattaaagcgagaatgcagtattattgatcccctgaataacgatctcgattctcgagagatcaacaaacgagtgaaaactgctttgatgctcgaaactggacaattcaacttttattcataccagttcaggtttctgtctcagtgttgatctgcctatcagagctgcctcctctggacttctagctgttctaattttctcaacgcaatcatatgcctttggattttcgccccaacaaacttgtttgcctttaaagtttttgggtgaaggatcaagagattatgtttttttgaaagagcaagata

SEQ ID NO: 27078 - DNA, 595 bp, Arabidopsis thaliana
tttcatctagtttttacttttattttgttactcacgcgtttcttgttttcttcttttctgtgtttcaggtgtatgtctaggcaaacaaggagcaaacaacagaaggagctgatcaacttttctgttttggacttgggaaaacttgaacgcaccaaccgaaaaacccaaagattagcaatggctgacagaatcattcgagctgatgcaaaaggagttttgagagatgagtatgggcaagcctacaatgaggctggacagagattggatgatcatggactcatcctacctgaggacgcattagggctcggtgtcgagcgacaccaactaggtgtcgatcgacaccttcgggagcagaatgcagatgcgattggtgtcgaacgacacaatagaggtgtcgatcgacacaaccccagattatgcagctattcctccagctacggaaccatgtcgtactcttggggatttcacaggcctggcttgttctatgctaatcgatcagcgatcgtaccccaacccttccagaggaacgattatgagctgaaacctggctatcgagtgctatgaggaccttgttctgagcatcaaagctaatgga

SEQ ID NO: 27079 - DNA, 668 bp, Arabidopsis thaliana
tggaagagggtggaaatcccttagtccagtgattaaccaagggttcattaatagttatacactatgtttggggttcgagtttcagagaacgcaatttcttgcaaattaatggtgcaaagcttatcggaggtctagaatatcgcatgcagagccgttcgtagtggtcttaagtgcggggagagcctgtccatcgcagggatgtcgtacattcagaaccgaattatgaattagaggatgccacatcaagaccttaaggttattgttatgaatcttcaagcgagtccttttgttgtacaacatgacatttagcaccagaaccttgagagaatgatacaatgaaataactgtgttgaacacataaacttcaacgaatattttctcaagtttgagattcttgggattatgatagtcgttgaattggcatacgcggtttttaaactatatagatataggaacaatgttgtgttctttggatgcgagaatgtgtttggggacaattggagcaaattgactcccttacggttagtatgaaggtttgaaagtgaaagatttatggtacgtttctagaaagtaaataaatgaatccaagtttcaagcacattgtctttacactagtgtggcaggctggcagacggagaaagagggtaacgttttctgctagagtcgac

SEQ ID NO: 27080 - DNA, 471 bp, Arabidopsis thaliana
aattctgtcactgaatcatcaaggaagtggatcatgaatgcgttcttcgtatcagtccaattggtcaataaacctgcttctagttatcgcaaccatgattttcctttgcccgcaagagagtgtgggaagagtttgcaaagaagataatcagctggtacaccatgtgctttgattgaggacactaagtcttcgaagacctctagatgatctagtggtgattcatcataatagcaaagtcttctcttgcaaaaggaggtagctggatcgctgatcgattggagtagaaaagatcagctatgttgaattcacctatggtagctggtttattctgcagatggtgtcaatcgacaccctggtggtgtcgttcgacactgtcgaaatctgccggcagtttgctgcgttccatcttgtaattcccctatcacaggaaaaagaagaaagtaaacgcgtgagaaacaaaagaaagaaaaa

SEQ ID NO: 27081 - DNA, 5096 bp, Arabidopsis thaliana
gtacttttcctgatttgaattagtcattacgttttataagagataagtattattccaaaaagaccactgaattttgaaaataaccaagatcaatgcacctaatgaatttcctacccaaacaaccagttttgaaatattctcactataccattgaatttaaaatacaagcaggattttgaaaatttacatagaagacttgttcgtgtttgttgtaaatttgcttatcaagacagattaagcaagtctctggttaattgacgtaggaatagataacttacataagttatatcagttttttttttttggtcgtcaagttatagcagatttgcaaagtatatatgttgtaaatatataatctaagatatattgggctatgaggcctctcccgagcccacttagattgtatagctacactaggttaaatcatgttgttgtatataaggcattgcctctcttacgtatcaacatgaaacgtctttttacatcttcatctcctttttgacatggtatcagagcaaaacctaaactactaaagggtttttgtttcttgattctgtgatctgtcaattccgctgcaagttatagttgtttctaaaattcgtttgtttccacttctttgacaaacttttctcacgatgagtacggagttggctcttaccacctcttcctcgactaccacacaacctcgccgtaccatctcaccatacgatcttacctccggagacaatccaggcaccctaatttcaaaacctctcttacgtggacctaactacgatgaatgggccacaaatttacgtttggctttgaaagcaaggaaaaagtttggatttgcagatgggacaattcctcagcccgacgaaacaaatcctgacttcgatgattggattgctaacaatgctcttgtggtttcatggatgaaactcaccattcatgaaagcttagctacctcaatgtcacacctcgacgattcccatgatatgtggactcacattcaaaaacggtttggagttaaaaatggacagcgcatccaaagactcaaaaccgagttagctacatgtcgtcaaaaaggaactcccattgagacatactacgggaaactctctcaattgtggagaagcttggcagattatcaacaagctaaaacaatggaggaagtaagaaaagagcgtgaggaagacaagctgcatcaatttctcatgggtctagacgaatccatgtatggagccgtcaagtccgctcttctctctcgggtaccactgccttcactcgaggaagcttacaacaccttgactcaagacgaagaatcaaagtctttaagtcgtttacatgatgaaagaaacgatggtgtgagttttgcggttcaaactactccaaggacccgcagcctcaccaaaaacaaagattctgcaattgtttgttctcactgtgggcgtcttggtcatctcgccgaaaactgcttcaaactagtaggatatcctccttggcttaagagaaaatgcgtcggaatgctacttcttcctcacgaaatcagtctgccagcatgggtcgtggctcctctgttgtacccgccacatctttcaaaggaaaacagagttttggtcgtggtgcatcagccaatcatgtcgcaaatatcggagaaagtacgactgctgcaacaagctcgatgtctggttctcagttaacagaagctgaccgtgtcggaataagtggcctgaacgatgaacaatggaagcaattgagacagatgcttaaagaacgaaatttcaattccaccaataccaaatccagtaagttctttcttgaatcttggatcattgattccggtgcgacaaatcacatgaccggtactcttgaatttttgcgtgatgtttgtgacatgcctccgattatgattaaacttcccgacggaaggcttacaacatctaccaaacacggacgtgtttatttaggctcatctttggatcttcaggaagtgttttttgttgacggtctacattgtcatctaatctcagtttcacagttgactagagcaaagagttgtgtttttcagataactgacaaagtgtgtattattcaggaccgcatcactctaacgctgattggagctggtaagcagcaaaatggattgtatttctttcgaggaacggaaacagtggcatcaatgacacgcatggactcgtcttctcagttgtggcattgtcgtctcggccatccttcctccaaagttttaaagttgttatcgttttcagattctactggtcatgcttttgattcaaagacttgtgagatttgtattaaagctaaacaaacaagggatccttttcctttgagcaataataaaacaagttctccttttgaaatggtgcattgtgatctttggggtccatataggactacatcaatctgcggttctaactattttctcacacttgttgacaactatacacgggctgtctggttatatctcctaccttcgaaacaaacagctccgatgcatcttaaaaacttcatatctctggttgagagacagttttctactaagataaagacaattcgcagtgacaacggcacggagtttgtttgtctctcttcattttttgttgaccacggtattattcatgagacttcttgtgtggggacgccacaacaaaatggtagagtagaacgcaagcatagacacattctcaatgtcgcacgtgctcttcgttttcaagctagattacctattgaattttggagttattgcgcactcactgcggcttacctcatcaatagaactccaactccattacttcaaggcaagacaccatttgagcttctatataatcgtcctcctccggttaatcatattcgggttttcggttgtatttgctatgttcataatcaaaagcatggaggtgacaaatttgagagtagaagtaacaaatccatttttcttggatatccatttgcgaagaaaggctggagagtatacaattttgaaacgggtgtgatttctgtctctcgtgacgttgttttccgggaaacagaattcccttttccagcctctgtttttgactccacgccagactcgcagctctcaccctccaacgcagatcagtcattttttttaccatcagaattacaagctcctacaccggtcagtattactacaactctggaattaacacagtcatcgtcctctaccaatctcaacgatgataattttcgtattccctccgacgaatcaagctctgttaatgagatgtctgacaatgaggatttgaattctccaactaccaatgaatcatctccgttcttgtcaccggcatcaccgtctctgcctttatcaccggcatcactgtctctacctctatcaccggcagcaccctctccgtctctgccaaaaatagcagaaccagaacctgaacctgaactacttggaaaaggaaaacgcaagaaaacacaacctgtgaggcttgcggattatgccactacattacttcaccaaccacacccgtcagtgactccatacccactggacaactatgtatcaagctctcaattctctgctgcttatcaagcttatgtttttgccatatctttgggtattgaaccaaagagctacaaggaagcgattcttgatgagaattggcgttgtgcagtgtctgatgagattgtctctcttgaaaatcttggtacatggacagtagaagacctacctcctggtaagaaagcattgggctgcaaatgggtgtttagactaaaatacaaatcggatggtacgcttgaaagacataaagcacgtttggtggttctcggtaataaacaaaccgaaggcattgactactccgaaacgttcgctcctgtcgcaaaaatggtcaccgttcgtgcttttcttcaacaagtagcatcattagactgggaagttcaccaaatggacgttcacaacgcatttctacacggtgatcttgatgaagaagtttacatcaaatttcctccgggttttggtagtgatgataatcgtaaagtgtgtcgcctgcgcaaagctttgtatggattaaaacaagctcctcgatgttggttcgccaaacttactactgctttgaatgattacgggttcatacaagacatctctgattattcgttatttaccatggagagaaacggcatccgtttacatattcttgtctatgttgatgacttgatcatcacaggctcttctctcgatgtcatcactaagtttaaagggtatttaagctcatgtttctacatgaaggatcttggtattttgcgatacttcttgggaatcgaggttgctaggagtcccgccgggatttacttgtgtcagcgtaagtacgccattgatattatcacagaaacgggtttgcttggagtctggcctgcatcacatcctttggaacagaaccataagcttgctttagcttttggtgacacgatctcggatccttctcggtatcgtcgtcttgttggcagacttatatacctcggcaccacacatcctgagttgtcttatgcaattcacatgctttcccaattcatgagtgatcctaaagccgatcatatggaagctgctctcagggtcgttcgttatctaaaatcaagtccaggtcaaggtattcttttacgctcaaatacacctttggtactcattggttggtgtgactcaggttttgattcttgtccgattacacaaaggtctctaacgggttggtttattcaactgggaggctctccgatctcttggaaaaccaagaaacatgatgtggtttctagatcctcagctgaagcagagtatcgtgctatggccgacaccgttagcgagcttctttggctgcgggctcttcttccagctttaggtatctcgtgtaatgaacccatcatgttgtattctgatagtctttcggctattagtctagctgccaatcctgtttatcatgcacgtacaaagcatgttggtcgcgacgtacacttcgttcgtgatgaaattatacgaggtaccattgccaccaaacacgtctccacgacatctcaactagcagacattatgactaaagcattgggtcgtcgtgagtttgacgcttttcttctcaagc

SEQ ID NO: 27082 - DNA, 525 bp, Arabidopsis thaliana
taatctaaaaggagtgttgctgtggacgataagcgactttccggcgtacagcatgttatcagaatggacaacccacgataaactgtcttgtccaatttgcatggaaagtactaagtctttttatctacctaatggaaggaagacgtgctggtttgattgtcaccaaagatttcttcctcatagtcatccattacggaagaatgcttctaccgagtatccacctgagtctttaaccagtgagcaaatttattacgagcggttgtatggtgtaaatccaccaagaaccaaggatgttggtggcaacaatcacgaaaagaagatgccaggctatgggaaggaacataactggcacaaggaaagcatattatgggagcttccatattggaaagatctaaatctccgacattgtattgatgtgatgcatacaaagaagaattttttggataacataatgaatactcttatgagcgtgaagggtaaatcaaaggacaacataatgtcaagaatggatatagaacgattatg

SEQ ID NO: 27083 - DNA, 399 bp, Arabidopsis thaliana columbia
tcgcccgtaactgctcgcccttatccaccctttgggcaagtaaccgttcgaccataactgcccaagtaaccgtctggataaccgcccagctggtcgaacagtcgaccagctacctcgagctcaaccgtcactcttccaactgcctcgagcttaaccgtcactcgtctggctgcccgagctggactgtcactcggcccaagtaaccgtcactcattccagctgagcttgagcttcagacgaactgacccgcatgatttcccctttgtctgagcttatggccagctccttctcacttgtccgagtctccaccttcttttcttggaccaagtcgtagccaacgatcctattgaggatcgtgggcgttacatagttgccaaagcaaagacttgcacattttat

SEQ ID NO: 27084 - DNA, 1256 bp, Arabidopsis thaliana
caactgtggaagacaaagtgcgtgcagacattgacgcggtgttggaagagaatctcgagttttggttaagatttagtacatcggtacatcagatacagaagtaccagacaacagttcaagatctgaaatcagagctatcgaaactgagaattgaaagcaagcaacaacaggaatctccaagaagtagtagtaatactgcagttgcatcagaggcaaagcctatctatagacacctcagagagattcgaacagaactacagctatggctagagaacagtgcggttcttaaagacgaactccagggaaggtatgcgtcattagctaatatccaagaagaaatcgcaagagtcacggctcaatcaggtggcaataaagtaagtgattcagagattagtggttaccaagctgcaaagttccatggagagatacttaacatgaaacaggagaacaaaagggtctcgaccgaacttcactcgggtcttgaccgtgtaagagcattgaaaaccgaagtggagaggattctaagtaaactagaagaggatcttgggatctcaagtgcaacagaagcaagaacaactccaagcaagagctcatcaagtggaagaccgaggattccattacggtcattcttgttcggtgtcaagttaaagaagaatagacagcaaaagcaatcagcatcatccctcttctcttgtgtcagtccatctccaggtctgcataaacagtctagttacagtaggccacctgggaagctccctgaataatcagtcaatcatctatttgttatttgcctttttcagttccttgttttctagctttttctgtcctgtacctgtggaagaaccaaatgagatacaaaccaaagtgaatgtgcttgctttcaccgttttctaaactttgaaatttactttggagattccgaagtatatttcaactttgaaatttactttggagattccgaagtatatttaaactcgtattactaattagtagtaagaaccttatatttggaggtcctactgtacataatcatattattgtccgagtcctaagaaaaaacattaatggaagcacaaaaacaatgaagtaaatgaactacaactccttcagtccggtccctgtcacggttgcttcatctttgggttttgatttagtcgcagctacagctagaggtgacaccgtggtagtactttctttctcaggtggtttgtcaatgaacttttatcggtgcaactgccaactattcatttttctta

SEQ ID NO: 27085 - DNA, 537 bp, Arabidopsis thaliana
ttaaagatatcccggaactcgcgcaattgcagtctgaaattctcgacgccatttggccgcatttaaaaaccggtggaactctggtctatgccacctgttcggtgttaccggaagagaatagcctgcagattaaagcctttttgcaacgtaccgctgatgccgaactttgcgaaacaggaacaccagagcaaccgggtaaacaaaatctacctggtgccgaagagggcgacggcttcttttacgctaagctaatcaaaaagtgatgagataacgggtcgcgactgatgaaaattatcattctgggtgccggccaggttggcggcacactggcggaaaacctggttggcgagaacaacgatattactgttgtcgataccaacggtgagcgtctgcggaccttacaggataaatttgacctgcgggtcgtgcaggggcatggctctcatccacgcgtattgcgggaagcaggtgccgacgacgccgatatgctggttgctgtaaccagttcagatgaaaccaatatggttgcctccaggt

SEQ ID NO: 27086 - DNA, 799 bp, Arabidopsis thaliana
gttagtcaattaggttacctagaaaaacagagcaagttctctgttcttacaaaaagaaagtaaattctcttctttattctttgaaatacatgtaaataaaagtgctatattcacaggtgttactatcggtgtacctatgcaaaagaccaaaactgcaatgctagaaagcgggtgcagatgatccaagataaccctccagtgtacagaactacttatttgggaaaacatgtgtgtaaagctgttgcagttcatgatgatacatatggttctgaaatgataaaattcgaccaagttgtatctgaatcggttatgcctcaactcgcaacaattgacgaacaagcaattaccatggaggacgaagccatagaccatatcatgaaccaagaatgtgatattaatgatttttctgtggatgatgacccattttgggctagtcaatttcctccattttcatcggaagacattatgttttttgacaatattgctaatcttgattagaaccctttccaagttttttttaatgttcccatggggagattgatcaattcttcacttcttttcaggttcatgttttgttattttagattcatatgtataagttttttttttcgtgtaaagttttaacgagtgatgtatttcaaaattagaaaagaaaaggagaaagtaatatctatctttgtaaaattcctaagagatataataattaagtaccaaaacgatgtgaaatgtcgctaaaatatagcaatactttaattatttatagttattccgaaatataatagttttgtgacttataata

SEQ ID NO: 27087 - DNA, 542 bp, Arabidopsis thaliana
taacttgcattgttcataaattatttccagaaaacaaaacaacttgatcttcgacttcgtctatgttttcatgaagtcacggaaaaagacgattctaatgtaacatagcttaagcattgacgatgacgtatttgatatgctttcttggtacgtcgtacttttttgtcccatatcaaattgaagaaatttgataatttaattcatcatttaccaactttgtaataaaacaaatagtcacaaaatgccgtaacaatctctgaattgtttttttaattagaagatgttgattaacaaagagagttaagaacaaacatgtttgatccaagtcacaagattcagcaacattacattcctttgatccatctctgatcttacaaacacgttttctcaaactttccatagacgatacttaacacctagcttgaagcaaacatgagcatcaatcgacgcctgaagaatctgatcgtcacaaagctcgtacgcactccaatcactcatgcttatctctcgatctagcctcactccacgataacccaaacatt

SEQ ID NO: 27088 - DNA, 873 bp, Arabidopsis thaliana
cgattaccaaataccccagtttcaaggtcagcaccatatagcacctatattgaaaaatcattgtggtagttaggagatacaggggtcctaatagaccataaacccccaaataaaaagaacaacaggggacaaaactttacctctatctcttcagttgctttatctactatccgccaatattcaccttcaacatcctcaagtgctggctcccagcagtctattgaattatcaactttacatttatcgtctgtagaagtttcactctttttaaagtactgagccttgaactcatcagcatatttttggaagtcttttagtgtgaaccctggaccaggttcaaacccaaacgtctcaagttcattcattccagtgcttgcagaacagggatcgcccataccattagtgacagaatccattcccattttcatgcactttcttttcttctttctcatttgattaggaagctttgaaatcttcttcattgaactccgattctgaagtttatcaactctttggacacgtgttgtaaatttagaaccctcccatacttgcttttctttcagtgggcacggcggtttccaggaaggaggaggaacaatgcgacagattccatacttttcagcctccggtcttattttagcgatataatttaaagtgtcttcaaactcctagaaacaggtttgcagtttatgttagaaatatggagctagaaattcagttaaaagggtttggaagtatagaatatgaacaagacctcttcgctcgggtagaatacaggggcgtcctcaaggtcaggcctacgagcttcatctggatgccatctcgcagttacctgccaaacttgtgaatataacgttagaggggggatcctct

SEQ ID NO: 27089 - DNA, 382 bp, Arabidopsis thaliana
cagttgaagttgttgagttcttaaaagatccaaaacgattcacagaacttggaacccgtaatccagcaggagttctgttaatcgcataagttttcttttgtatgccttgagtagtcccctattccacgtatatttcttggaggtagtgagatgagcgattcagaatatatgaaattagcaataaaactggcacaaaaaggggctggttacgtcaaccccaatcctatggtcggcgcagttattgtaaaatcttcttcatcgatgggactaggtgctcatggacttaacgtggactcgatcgtcgcagaggtactgtcgaacgttgtcaaacattgaacgaacttgtgattgagatggatggttttgagggaaatgaagggat

SEQ ID NO: 27090 - DNA, 597 bp, Arabidopsis thaliana
tcccagaagaagaagactagtcaatattggttgcgatggccttgtagaggcattattatctgttagataatattaaacattaatgagaaagtagaaatgcttctgtataaataccttcattacttgtgtcttatttcatcaccttcaccttcaacatcaaacatcacatttcttcctcttttctctcttttttctcagtcttcaaagagtttcttagtaacccaaatcaatggcaggtatcaaagttttcggacacccagcttccattgccaccaggagagtcctcatcgccctccacgagaaaaacctcgactttgagctcgttcatgtcgaactcaaagacggtgagcacaagaaggagcctttcctctcccgcaacgtaagtatatctatatatctatgtgttgttgtaagacaagagaccaactgttttcatgtatctggcctgcatctcaaatgttttgtgtttgaacttctttcctcttcagccttttggtcaggttccagctttgaagatggagactcaagctcttcggtatgaactttccatgcatcatcttcaacgcaactctgagttgcaaaaccattagagacaaa

SEQ ID NO: 27091 - DNA, 604 bp, Arabidopsis thaliana
actcgaccaatgtactcgatctctaggccgtctgtagagttaaagttttgaatttttactctactttcacgttattcctctattcctcagaaccacaaacacaactaaaacaaataaaaaataacaagaaagtaaaacttatttacaaggataatcatgggacttcctcgcaagtgagcttgtttaaagtctctagcttgactcctcacacttatcatgaagaaaatgaatgatagagagggtctgcatagtcctctctagtatcatcatcatactctacagcagaatactcaattcccctttcttcaaaataggcttctttctcttctcgagggtaatctatcacttcagaccatcttgaagtgaacttttttctcgggatagttttaatcccgcctttaggttgagcttccttctgcatctgattcagcttactcctaagttcctcaacagagtgagctagcctctctatagtttcttcttgcttatcagacctctttttaagctcttttactttctccgtctcatacccttctcctgggatcactctatagtcttcagaggttttttcatcttctgttgactcttgtggaattttgttgat

SEQ ID NO: 27092 - DNA, 407 bp, Arabidopsis thaliana
  unsure (1)..(407): unsure at all n locations
agctctgtgtcttaggatgtaaatgtctaggtttaacccgtgtacttgagagaaattatagacatttatacgtgaacaaagtgggtggaatgttagagagggtaatgcatcaaggaattgactttagggatggttgcatctgctgtgtaaatggggtgcacttagacatgatnatacggatgtagacaatgttagatattcacatgcctcggactctgtttntgctaattttcttttggatctagaaactctgacgcgcggtagcgttaagcttatagaggtctatcacaggtgatttatatgctatagtccagactttgttacgaatgatctggactcttttggagctgtggagcctcagtcttgacacatttacctatcagagcctntttccaaataggttttgc

SEQ ID NO: 27093 - DNA, 523 bp, Arabidopsis thaliana
aatgaccattcacaaatttatgacctaattgtactgcttgttttatctgaagcaccattcacaaatccaatcatttaccaatgcatgcataatatcctaaaacgagcctaatcaaaaaaataacggtcttctatcataccttatttgctccatcatcatgttgaacaactgcattcgttgcctcttcttcttctgcacaagaatcggcatttgggtctgaaagatcgtcatttgattcccatgcgacggcgtttgaattacccaaatcggcggcgtcacaatcgccggttgtaggctgaatttctccggcttcctcttctgttgtagaaatttcgccggtcgcttcaaccctagttgattcatattctccagatgagtcttttactctagccatatgaaagagacaaagacgaacttgaaattggtggtgtcgtcggagacgagagaagacgacgactggagagaagaggaagaagtcgagaagtgaaaaagggggaagaattaagtttttacttaggttttt

SEQ ID NO: 27094 - DNA, 505 bp, Arabidopsis thaliana
gacgtactcttttacgacgccttcaaaaaaatggggcacctcgattccgagctgcaaggcagaaaaacgccacttaccgggttttcttgtagtcgacaagaaagctcctttcaacgcaatactgggaagaccatggctacacgccatgaaagccgtcccatcaacctaccaccaatgcattaaattcgcctcggaaaaggggatagcagtcatatacggcagccaactcagctctcggagatgctatatgggcagctacgagcttatcaacgatgctgtagtcgtagtactgatgttagaagtcgagctcgcggatatgaaaacagtcagatcctctgatccttctcaatgcggacctcaaaaatcatcgataacgcaggtctacatagacgaatcagatcccaaacaatgtgttggggtaggtcaagacctcgacccagcgatacgagaggatttcataacctttctcaaagaaaacaaagacagcttcgcctggtcaagtgcg

SEQ ID NO: 27095 - DNA, 467 bp, Arabidopsis thaliana
tagatagaaaattcgactagtaagaaactgaatattttctggaagccatagagtgttgttcatttatgttttaaaagcgacattttatttattatatatgtgatattcaaagtcattataacatgtatactatacttttaacacctagtttttatttctgttcagtgacaattagagcctcgtttttttatttagtcttggggtcagtatttaagtatcatgtaaactataatttccaggtttttgaataaagcaaagctcaacaacaagatatcagcaacacaagttgaagaaacaagaacgtttctagctctccttccaatatttgggagcacaattataatgaactgttgtgtcgcacaaatgggaaccttctccgttcaacaaggcatggtgacaaacagaaaactctcgcgttcctttgagatccccgtggcttccctcaatgccattcatctactgtgcat

SEQ ID NO: 27096 - DNA, 555 bp, Arabidopsis thaliana
ggattagaggatgggagatggcatgaaattgatgtagtttagccaggatggacaattctcagtgcggtctgcttatgagatgttaacggtggatgaggttccaagaccaaacatggcaagcttctttaactgtttatggaaggttagagtgccagaaagagttaagacgtttctatggttagtgggtaatcaagctgttatgacagaagaggaacgacatcggagacatcttagcgcctcgaatgtgtgtcaggtttgtaaaggtggagttgaatctatgctccacgtgcttagggactgtccagctcaattggggatttgggtcagagttgtgccgcaaaggaggcagcagggtttcttttcgaaatctctgtttgaatggctctatgataatctgggggataggagtggctgtgaggatattccgtggtccaccatttttgcggtgataatatggtgggggtggaagtggagatgcgggaatatttttggggagaacacgaaatgcagggatcgtgtgaaatttgttaaagaatgggctgtggaagtgtatag

SEQ ID NO: 27097 - DNA, 516 bp, Arabidopsis thaliana columbia
tccccaaagatgaagaattctatagataacctagcaaagggaacaatctactaaaccatatgaatccctaatgagaaaccctattcctaacaagcagattactcagacatattggatgaagcaaacaacatatttgagtgtgaaagcataaacatagtaaatagagaaggggaaagaagggatctcttcactgtattaatgatctgaatgaaactctgaaaacaatcgatgattagcttatgtctctcagtaacagggttttgtagaaaacttgataatgaaaactggatgaaagacttgataatgaaaactagggctagaaacaatatatatagaccctaaaaacgtccagggactaataatgcaaatagggaagtcttctggggtaaatttcctcttctgtaaactcgaaagcgtctaggacttttgctgggccgaaactggtgtcgagaaataacataaagactcaaaatcctatacctaaaacatagataaaatcagtgaaaatcgggttat

SEQ ID NO: 27098 - DNA, 759 bp, Arabidopsis thaliana
ttaaagaatgggctgtggaagtgtatagagctcattcaggtaacgttttggtcgggattacgcaacctagagttgaaaggatgattggttgggtgtctccatgtgtgggctgggtgaaagtgaacacagatggggcgtctcgtggaaatccggggctggcttctgcaggcggagtactacgagattgtacaggagcttggtgtggtggcttctctctaaatataggccgctgctccgctccacaggcagagttatggggagtgtattatggattgtatttcgcatgggagaagaaggtacctcgagtggagttggaggttgattcagaggtgatagtgggttttctcaagacagggattagtgactctcatccgctgtcattcctggtgcggttgtgccatggctttctacagaaggactggttggtccgaattgttcacgtgtatagagaagctaatcgtcttgcggacggattagcaaactatgcattttcgttatctttaggctttcactcttttgatttggttcccgatgcgatgtcatctttgttgagggagatactcttggtctacccgaccaaggcgagttcgtttgtaattttctttagtttcttaataaatcacgggaggcaattgtctcccggtcacttaccaaaaaaaatgagtggattttgtttttatattttcttatttctttaaaagttacaaaaacaaccctatgaaattattaggtttcttgtgaagtacacgaagcgtcgta

SEQ ID NO: 27099 - DNA, 600 bp, Arabidopsis thaliana
cttgattgagcgatcgattgataacaaacagtggaagcccattagtttgtctcaaggcggtcccaagttatctcatatctgttttgctgacgatctaattttatttgcggaggcttcagtaacgcagataagagtgattcggaaggtgctggagacattttgtatagcctctggtcaaaagattagcctggagaagtcaaaaatatttttttcagggaatgtctcacgtgatctgagcaaactgataagtgaggagagtgggattaaagcaacaaaagacttgggtaaatatcttgggatgccagtacttcataaacgcatcaataaggatactttcagtgaacttttggagaaggtctcttcccgtttatcgggttggaaggagagaactttaagttttgcgggacggatgacgcttaccaaagctgtattatcatctataccggtccatacaatgagttctattgcgctaccacaatcgactattactcgattggacaaagcttctcgttcctttctttggggaagccggctgagaagagaaacaacacttggtgtcttgaaaaaaggtctgctttcctaagaaagatgggggtttgg

SEQ ID NO: 27100 - DNA, 791 bp, Arabidopsis thaliana
catatgtttaacaaataatcaaaagtaatagttatatttaggaaaaatatatataaatataagtataaacagaaagtatatataaccaaactggacatagttatgacagatgaggaacggcatcgaagacatcttagcgcctcgaatgtgtctcaggtttatataggtggagttgaatctgtgcttcacgtgtttagagactgtccagctcaattggggatttgggtcagatttgtgccgcgaaggaggcagcaggggttcttttcgaaatctctgtttgaatggctctatgataacttgtgtgataggagtagctgtgaggatataccgtggtccaccatttttgcggtgataatatggtgggggtggaagtggagatgcagtaatatatttggggagaacacgaaatgcagggaccgtgtgaaatttgttaaagagtgggttgtggaagtgtatagagcacatttgggtaacgctttggttggaagtacgcaacctagagttgaacggctgattggttgggtgcttccatgtgtgggttgggtgaaagtaaacacagatggggcgtctcgtggaaatccggggctggcttctgcaggcggagtactacgggattgtgaaggagcttggtgtggtggcttttctctaaatataggccgatgctcagctcaacatgcagagctatggggagtgtattacggattgtatttcgcatgggagaagaaggtgcctcgagtggagttggaggtggattcagaggcgatagtgggtttctcaaaacagggattagt

SEQ ID NO: 27101 - DNA, 599 bp, Arabidopsis thaliana columbia
cgattagtagtcgtcaaatctgaaactacgactaatccacgactaatgacagtagtcgttataccatagtcgataagtcgttgatttacgactaagttacgacaacagaccatacaatataaattagtcgttgagtagtcgtactataatggcgactaattggcgacaatttcacgattaataacactgtacatagcgtgtgaaacatatagtcgtcccatagtcgttaaattcttccgacaatgttacgactattttccgagtaaatataatgaaccctgggtatctttcaggttatcgcaaaatagtcgtaaaatagtttacgacaatatgccgactattaaacgagtaaatgtaaaatactaaggatatgatatacttagtcatataatagtcgtatacgattaggttatgactaatttggtttgtcttaaaatagtcggtaattttggtgactattttacgactactatatgtctaattggctagttttttacgactattttgcgacttctgattttgtccgaataaaaatttggtcatcgattgttgggttcttgtatgttgtttagtgttatggtctgttgttgtttgttgtt

SEQ ID NO: 27102 - DNA, 564 bp, Arabidopsis thaliana
tgatttgctttaatttagtttttttttttggtaggagagggggagacaatggtctcccctcatttattagatactaaactacaaaaaattataagcgtacatgtcgcgggaacgagtcccagtcgcatcctctaacataatcgaatgaactatatcaggacaagaatacaaagaaagaaaaccgaactgaagtgaaaacgcatagttagctaatccgtcagctagacgattagcctccctatacacatgagaaacccggactaaccagtcctttgaaagtaagccatggcacaagcgtaccaggaatgccagcggatgcgcctcgcttatccctgactgaagaaaccccaccaccaactccgagtccacctccaactcgactctcctaaaaccttgatcccaagcaatgagtagaccatagtagaccccccacaactctgccatcggagccgaacaaacgccaattggagtgcaaaccccccaacccacaaaccatcctcatcgcggatcactccaccagcggcagcggccctgggttacccgactcgccccatctgtagagac

SEQ ID NO: 27103 - DNA, 1548 bp, Arabidopsis thaliana
gattccgatggattttgcaggggagagtatatgcgtgccgtctaatatggtgaagagatcgcgttttgatttgtttgtgccttcgattttcgcggcggttatggtcactgcttcggcttgtttgatccgatcatgtattggcacggagaatgtggatgatttttaataaacacttgtaaattaattaataatcttgtattcagttactacataacatccaccattttgttattccaaatcacgacattatattaagctgcgtcgtagaatagttgacatttgtcagtgttaacccaacaatttgatctgttatgttatccacgacccaaaatcacaactaaacaatttgacattccgttttgccatcgtccggttttaaatcaccatcaaattagtaattagtcaagtgatcatgacaaatgccgagagatacaggagacatttgtgtgattctgaggtttgtcaggtttgcaaagggggagtggagactatcttgcatgttcttagagactgcccttcgatgtcgggaatatggagcaggattgttcctaggaggaaacaacaagcgttctttacgaagtcattatttgagtggctctttgagaatctctgtgagcaggttaacgtggaagaggggccttggtccacgatgtttgcactagcagtttggtgggggtggaagtggaggtgcggtaatatttttggtgagaatagaaggtgtcgggacagggtacgctttgtgagggatttggcgaaggaggtatcagcagctaatcaacagttggtcactcagggaggtcgacgctcgcgcgtagagattctggtagggtgggagaaaccgttgcttggctggttgacagttaatacggatggggattcgcgtgggaatccgggtttagctgctgcaggaggagtattacgagatcatgagggaaggtggtgcggaggggtatctctgaatatagggagatgttcggcaccaatggcggaattatggggagttcattacggactccatttcgcatgggagaggaaagcaccgcaggtagtgttggaggtggattctgcgatagttgtggagttcttgaggacagggataagtgatcatcacccgttgtctttcctggtacgattgtgccatggctttttatcgaaggactggatagtccgaattgttcacgtgtatagggaggctaatcgtcttgcggatagattagcaaactatgctttttctttagcttttggtttgcactttttttactctattccgaatgttgttgagttactttggcgagaggatgaccttgggatagtttgcccaagacagatcccagaacggtaatttttagttttaagtttgaataaaaacggggggctctttgccgcccggtcacttaccaaaaaaaaaaataacctactttataaacattttaaccaaaacgttttgtgacctatcatgataatttggtctgcaacatatgtcaacgtaaagtttataggcccaaagacgatcaatattagaatgagtagtagcacttatacttgaaa

SEQ ID NO: 27104 - DNA, 1178 bp, Arabidopsis thaliana
gtcgactcatccccccattctagataaataagttaaatactaatttctttaatttagttaatttacataaattatcaaaacgaaaatacatttttactttttgaaaaaaagaataaccaatcaaaataaacatataaaatttgacatctaatttaccatattaatttgttattttttttttggtgattcactgggagacggaagctcccggaataatattaaaaaagaaaaaaacaaagcttacaaccggactcgtcttggtcgcgttgacccaagactatcctcatgcaaaatcacctctaaatcatccggaacatcaataagagaatgaaaacctaaaggtaaagaaaatgcatagttagctagaccgtcggctagacgattagcctccctatacacgtgagttattcggacaatccagtccttcgataataagccatggcacaaccgcaccaggaacgacagcggatgttgatcaccgatccctgtcttgagaaaaccaactaccaactccgaatcaacttcgagctccacacgagtcaacgccttagtccaagctaggtaaaatccataataaaccccccacagctccgctaaaggcgctgagcatctcccgatattaagcgcaaagcctccacaccaatttccagctccatcccgtatcacaccacccgccgtcgctaaccccgggtttccacgagaagcactcttcttctttgtctgataatgcccgttccttattctttttcttctattcttcttcttcaattcttcttcttcttcttctaaatgactaatatcattcttcttcttcgattcttcttcttcttcaatccttcttcttcttcgatcattcttcttcttcgatccttcttcttcttcttcttttctgagttggattcgtcatctgaatgctttcaaattgatggttggatttgatttgctttagtttcttcttgctttttctttgtggttttggattccgttgatgatgcccttcttcttcactgttgatttggatttcaatctagaaatgaaggcttttcaccatttttcacaagtttttttcctttttttttttaacacccagacaaaccgaaaaaccgaatgccaaaaaccgaataaaccgtgtccgaaccgaaccgaaccgaatcattagtcggttctattcggaatag

SEQ ID NO: 27105 - DNA, 584 bp, Arabidopsis thaliana
acgaagaggaacaaagaagttcgaaaagaaagatcaatgtgatcctctgaggctccaaactttgccgtgattctgttactgctatgaaaaagcataggcgaaatgttctacttaaatcaagcttgagtgaagaagtgaactaccaaggctcttcaatatcatttcacgaggaagaaacacggcacctcgaaacacctcacgacgatgctctagtcattactctagacgtggctaactttgaagtaccaagaattctcgtcgatacgggtagttcggttgatttgatctttctaggtactttggaaagaatgggaattaagagagcggatcagccatgtctcttggaacaatcaagttacaggtggttagctggaaagatgtcgaagattgtggactttatcatttttgacaaaccggcagcttacaacatcatcctcggaactccttggatttatcaaatgaaggcggcccctttacgtatcatcaatgcatcaaatttccaactccaagcgtagtggaaacaattcggtgagaccaagaagcttcgtggacatgttatctactagcaccgtttgaaggccaat

SEQ ID NO: 27106 - DNA, 468 bp, Arabidopsis thaliana
tatcatccgtctcatcaacatcttctgttgtagctccttcggtatgactgatctcctcagttggtggactgccctcgaaataaagatctttaagcgcaggcttgaagtcaatgttcctgccctcgagaatcctagtagcgtcaatgcaggggagaagaatgttggcgaaagtcgcgagccatgtcaaactccaagaactcacatctacgcaaatgatccaagtccatcatcctcggtgctaaccctggttccttgagcggtactccacaagcttccagaattggcgtcacaacgccacccacgcatagtgctcctctcaccttcttctttccgttcttcaacgcccatttcctgtatccacacagatggatcaacagagacattactggtggtgcgttgttgagatcgcctctcaagacattcttttcgttcgtctgacggagaatccctgtaagcgcataatctatc

SEQ ID NO: 27107 - DNA, 1301 bp, Arabidopsis thaliana
gtccaagctaggtaaagtccataataaacccccaccagtccgctaaaggcgctgagcatctcccgatattaagcgcaaagcctccacaccaatttccagctccatcccgtatcacaccacccgccgtcgctaaccccgggtttccacgagaagcaccgtctgtgttcaccttataccaacccgtactttgtgcgacccatccaatctgcctctccactcttgtcggaatcccgttaagcactgtagcccttgcattcgccacaaatacttccttcgcgacatccttgatgaactgaactctatccctgcatttccttttctcaccaaaaatgttaccgcatctccacttccatccccaccaaaccgccatagcaaacaccgtggaccaagagctctcttgaaaaggggtttcttcgtgcagattatcaaacacccattcaaacaaagtcttgtcgaagaacgcacgccgcttcctctgagacacaattctagtccagatccctgacatagctggacaatctctgagaatgtgtaaagtggtctctactccccctttacaaatctgacaaatctccgactcaccgatatgccttcgataacgctctgcatctgtcataatcccttgattgaccactaaccagaagaaagctctcacacgttctggaaccttaactctccatatccgattaaagaatttctccatattaggtcgtggactatcatcccaactcagcatattataagcggacgatacactgaattggccattctgactctcattccaggagattctgtctctcgcccctgtcacatgatccgatacgattgcccgtagctctagacatcggctctctgaaacatacggactgatcctactgacatcccagccactatcgtccttccacaaactccgcactgactctgtctccaagttcgccggaaccacgccctgcccatcttcccataagggtttccctgagacccagatatctcgccaaaaacgaatatgatgtccatcaccaggaacccagcaagtcccccgcgatatcacatccacaagccctgttacaatgcttctccaagttgatgaccaagtccccttcttacgcagccactgacaatcccggagatcgccaattttatacttttttcttaagacctcagcccaaagactcgactggtcctgcagcagacgccaaccaaccttagcaataagagccttgttcatcaatttcgcattgcgaatgccaaacccccatctttcttaggtaagcagaccttttttcaagacaccaagtgtt

SEQ ID NO: 27108 - DNA, 1649 bp, Arabidopsis thaliana
gaatattgggagaagctcggcaccaatggcggaactgtgtgggagcatattacggtctctacttagcttgggagaggaaatcatcacatatagagttggaagtagactcggagatagtagttggttttttgaagacagggataagtgatcatcatccactgtctttcctggtacgtttgtgccatggcttcatatcgaaagattggagagtccgaatttttcacgtgtatagggaagctaatcgttttgctgatggattagcgaactatgttttttctttaccacttgggtttcattttgttccgaatgttgttgatttattttggaaagaggataaccttggggtaacatgtccaaggcaaatcccagtccattaggtttgttttcttaagttactttgaatagaacgggaggctccgcggcccgatcgcttaccaaaaaaaaatattcaaaaaaaataattataaatataaaaatcaaaaaatatattataaaatcagaacgttaaacagaaacatccatgtgaaaatcaatataatgttaaatcataaatagaagttaaacataaatattcattcaaaaaaatataaatctttataactatgtatatgaagtccaaaaatataaatctttataattatgtatatgaaaaagttgaagaaaagtgtaaacgaatgaagccttttaaatcagtaaatggcttcatttttttctctcccttgttgaacatttgtgcatgtttatttggtttgagttatgtgtaatttttttgtcctttatgtagcactcagtttcagtttcggttaagacctatttcaatctatacaatttttgtcatactttttttacaccaactttgatactcttaacatgaacgtgttttggtgtggcaaatttttattcccatcatatcgatctctaatttgtttaacaaaaattaataagaaacttttattcgacctaatttttactagcacggaacaaatttatatatatgcacttggaatgacgtaattgaatatatgaatggaagttaggatccaaaataactatgtagtatttgaatcttactagctcactcgatgagaatggaagtaggggtaccaaaataaaaaatttggccaccacaaccagattggtaaattcgaccggacatttattccggttagatctcaaaaacaatattaaataaatacccaataaggaaagtcgaaattaatgcgtttgataaaagatgatcgtctgaattagatacgcactaaaacatcaaagagtcactctaaactcatctctctcgccgaattctccccaacaatttccgccggaaacaaattctcagattccggtaactctaaaactatgtcatcggatattccgtgctgcggaaccacgttctcgctctacgtcgtgataatcatagctcttgtagcgttcgctggcttgatggctggtttaactcttggtctcatgtctctcggtttagtcgacctcgaagttctcatcaaatctggccgtcctcaagatcgaatcaacgccggtgagtgcttcaacttgatgacgattctgttgaattttgaagattctgttctttagctgattttatgatttttaattgtacatagcaattgaagaacatgtgtatttgattg

SEQ ID NO: 27109 - DNA, 737 bp, Arabidopsis thaliana
ccctatcataaaactggagacttgatgtaattggtttatttttttcctatcttctatttcagggaccaattgtaacaactattagatcattgttgactccttatcctatgaacgagatgcgggtgacggtactttcagatagtccatttcttgcctcttgttattattattcctagggaaacatggtttatgcaaatagctttctacattcctttttcgtacacaatgacaatttttggtctgatatttcagggtacctatatgcctcacagagaagtaaaggctgcgcagggtatcaaaattgctgcacaggtgattgtctctgacattacaattactttattcttaccttgatcttaattacttagcacaaatgaggacatcctgaacaaatgtttcctatatttttggtgtttataaaagggccttgaacacgccattgctggtactgccttgcatgtgattggacctaatgaggacatggaagaagccaagaaaaatgccatggaagatattgagtcagttatgaaccgcattgacaaaagtggtgaaggcgtttatgtacaagcatctacattagggtccttggaagcattgctcgagttcttgaagtcctcagatgtaaaaatacctgtcagtggtattggcataggacctgtgcataagaaggatatcatgaaggccggggtaatgctagagaagaaaaaagagtttgccacgattttggcatttgatgt

SEQ ID NO: 27110 - DNA, 757 bp, Arabidopsis thaliana
ttacgttagatgtacacgacgcttaatttgctcaaggcttattctagagacaccacacgtatgccacaagccttttctcctctttccacgtgtccaacaaacagacaaccacgtcattcccatccctgaaccatcgccgttcccttaaacctctcaccgttcgcttttactccgacgtttacagagactatgctcttcgttcctttctctctctagatcttaagcccaaatgttgcacaaggcttctcccgctctctctctcttgagctccggctacaccggcggtggaaatctgtttcctccgtcgagaaattcgtcgaatcttctgttttctccgagtggatccaggttttctgttcaggcggcgaaaggaacgaacacgaagtcgttaaccggagttgtattcgaaccttttgaggaggtgaagaaagaaatggagctcgttcccactaccccttttgtttctctcgctcgccacaagttctccgacgattctgaatctgccatcaacgatcagatcaagtatgttctcttgcttagttttttggtttagtctgtctctagtttttcgaatctcttctctaagaatcaccccaatcgaaaattttgaaggaaccaaattcattgattgattaatatcttcccgaatgatcatcatttatcatcatggtgctactgatctgaatcgcaattgttcatatcttgctttcaatgattttgcttgtgggaatcgtgttagcttggttaatacgtgacc

SEQ ID NO: 27111 - DNA, 601 bp, Arabidopsis thaliana columbia
gttgcttgagtagttgttggagctggattcccctccaggaatcccccaacgaaaataccaagccagcccacaaagcccaccaaggccaccaagtagaggacctacgcaactgatgagcccacatacgcgaatgggtacttgggcctgataagctcggtcacctgatgaaggaagataagcaaagtagaggacatacgcaactgatgagcccacatacgcgaatctgtaacgcccgcgatcctcaataggatcgttggctaggacttggtccgagagaagaaggtggagtctcggacaagtgagaaggagctggccataagctcggacaaaagggaaatcatgcaggctaagctaggatcgtaaagaaatcagctgggtcagctcgcccaaagctcacgctcagctggaaggagtgacggttactcaggtcgagtgacagtccagctcgggcagctggacgagtgacggttgagctcgaggtagctggacgagtgacggtagccgggctgtggcgcgaataaagaaggagggtcggatcgactaacctcaagaaggaaggtaagggatctagactttgagtctaagggttctaggatgtgag

SEQ ID NO: 27112 - DNA, 557 bp, Arabidopsis thaliana
gttattttgaagaggcaaagacgggtgccagattctgttgaaaacaaaaaaaaggaaaattacccactctgatgatggggaaggtggactcagtggtggtgatggttctggagacgaagcgtttgataagtatgtggtcgaattgaggcgtttcttcaagaggcaaaaacaacttttggataataaatttgaagatttaaaagaatttgtccgtccagagatacgtgctgctctacattctcaggaccgaaacgaagaaggaacacgagcatcccacaaatctgattcaccatctgagaaggttgagatggtgaccaaaaagtttgagaaggtgaacaaaaaggttcaccaggtagctgaacaggtacagaagaaatcgcttaagaaatccatcaaataaaataattttgtaccaagaagatcttccaggttgaataatactcccaagaaggctggaactgttagtcttcctgttgaggtacgtctacagcaggtaccttgtgtaaataaaatttaaaaataggtttttacaagtgtacgtacaccaaatacttagg

SEQ ID NO: 27113 - DNA, 842 bp, Arabidopsis thaliana
  unsure (1)..(842): unsure at all n locations
taaaatcaaattgttttcttatgatatttaagactcttataagcttttggttcttacttttacaaggaacacaatctgattctctttcctttgttctccagttccgatagcatttactgaaagtcaacaaagaaccaagtcattttggtttatagactcaaacacctaagatagttgcagataccaaatttacagtgctaatatgcattgttaaaaaggcgtaatgaatgataaggttttctgtagataggaattttatgttttttgtcgtataataaaatgtatgtttcatacaaaagtatagcgagagagtgtataggtttcttgttgtatgttttgcttccttagagcgcaaggcatatgaggagatcctcttaaatcatgtttgttttcttcagctatatattttcaaatccaacggttaactaaataacttcgttttgctaatctctaaaccaaaaccaattccacactttcatattgtagttacccataaaaccatctgttaactaaatcactctgttttgcttcataatcaaaccaaaattttatattgctcatagattagaagcagattaggtttcattagtgtaaactgatctgcttaattacacaaggctaagttcctgaaaccctaactaagacttgaggctaaagaaactatctgaaacaccagaattcatcatcaatagtccaaagtccaaactcatcacagaaacatacctgcaagcgtaacatcaaaccataacagttcgacaaagctcaatgacatgcctcatcggcaagtcncttgacacaatcgagactgatttaaccccccccaaatctgatcccttgacgtg

SEQ ID NO: 27114 - DNA, 615 bp, Arabidopsis thaliana
ccaaaaattaaaatgcaactcgacactgcctcaaatggaaactttctgaacaaggatgtagcagaaagatgggagttactcaaaaatctagcacaatatgatgggtgctacaatgaagactatgatcgctcagtgagaggaactggaggcactgaggatagacagagcaaagatatcaaggccctgaatgaaatgctagacaaactatttttggctcagcagaagcagatacactacatgactgatgaagagcaattccaaatgcaagaaggggagaatgaccaaacagaagagtcctgctatattcagaaccaaggagggttcaacaagggctacaacaactacaagcccaacccaaacctctcctacataagcaataatgtagttacccccaagatcaagtgtatccacaccaaggttatgtccctaaacaacagttcaatggaggataccaacagcagaatccacaccaaagttcactcaataaccacaacaagccccaacaacacaagatcctgaaattaagaaacttattcaatagatcattcagggacaagctactggagctatggcttttgacaagaagatagctgaattcacaccaagataggttgt

SEQ ID NO: 27115 - DNA, 561 bp, Arabidopsis thaliana
caacctagcgctccaaaccacaaaaaggtcgctcaaggcggaacattcgtaccccatgaaggacgaaatttctctggagcccacaattatcaagctgatacgccctaaggccgaggtcgcggacgagaatcctatacctggacgaaggaccaaccagtgggaaacgagcaggaatactgcgaattacataagagctacggccatcatacttccagatgttgtagcctcggggcaatgttggcagctaaattcctagccagagaaataggtggaggcctaaccatcgaggatttagaagcggagaaagccaaaaccgagcaaggtcaatgttgtggcaaatcctaaatagacagcccccgcaacgaacctcgaatgatccaagagaggcagaggcaatcgcgaggcagatgacgacgaaccagaagctgctcggggaagaatctcacaattttaggagatcagctttctgtcaagacacagcggcatcaatcaaagcttatcagaggaaggccgactcaaatcgcaactggacgcgactgtttaaaggacaagatgacgaag

SEQ ID NO: 27116 - DNA, 527 bp, Arabidopsis thaliana
aacgcatcaaataacgagtctcagtacaaagccctcattgctggcattaagctagctcaaggaatgggaatctgcgatatacacgcccatggaagctaaagacgagcgcatggaagcgtacctcaaactagtcaaaaccttgatcaaacagttcgaatagtgtgaactgaccaggatccccagagggaagaacacctctgtagacgccttggcaactcttgcctccacgtcagatcctttcgtcaaaagaattatcccagttgaaggaatagaacacccgagcatcgacctaacggtcaaacacgctgggacggaaacctcggcaacttgcaactttacgcgagtaacccgaagcaccaccgccgcggctagagcccttgtagtagccgcgaaggcaaatgcagcggaggaagagccggagtcggaaccccgaacaacctgcctcgtacgaacctgaaccgtacaacgactagagaatccaatcatcgattacatcgaacgagggatccacctcccgacaagtggga

SEQ ID NO: 27117 - DNA, 962 bp, Arabidopsis thaliana
ctgcagatctccagtctttgtttccaagtcaaaggagaaagattcttcccataaagatgatctctaaaaggaccattggacatgtattcgtatacaaggatcatctctgcgttctcatcgcagtatccaatcaatgagactaagtgtctgtgtctaagcttagatagcatctgaatctctgtatgaaactctgtgatcccttgctctgactgtggattgcctcgtttgatagcaacttgagttccatcgtcaatggtaccaatgtaaacgttaccaaatccaccaacaccgatgatctctgatgcatcgaagttctttgtgacttcttgaagctcagagagggagaaatagcgtccgaggccaagcgcggaattgtacaagttggatttgtgagaacctgttttgcttgtcatgaaggtactgtcaccagcgtgtattggaagtaaccaagaagagaaactgtttctcttctgccaatcttgtggtctcttcttccacttgtaaaccattgctccaagacctacgaaggctccaaacatcatcacaaaacccgcggttgcaaccatcccctgcttccccatactcgctctttgaccatccactccaaattctccatcaagactgttcacagagttgctcatcttcaagacctcgacaccgttcaagatcgcgttctttttcccagtgtcttctcccataggaccaatctggacctgaagctcagatgtcataagtgtcgagttcaccacaatgtctttgtagtaaggagcagaaagatctccagctacagtggacaaatctagcccggaaatagcggtctttccattgatgtaaacgttgaagtagaggtcattaagagacttgctgatgatgtcacagaaatgaagacgaatgaagtagtgaaatgatgggtttgatgggaaattccatgtaacattgaagttaggatctatggtttgaga

SEQ ID NO: 27118 - DNA, 450 bp, Arabidopsis thaliana
gccaacccggtcgtcgttaaaaagaaaaatgggaagtggagagtgtgcatcgactttacggacctggttgaagccactgcggaacacgaactattgtccttcatggatgaatcctccgggtacaaccaaatacttatgcgcccagatgaccaagaaaaaagagcttttattactgactgaggcacctactgttataaagtaatgcccttcggtttaaaaaacgccggagctacttaccaaagattcgtgagcagaatgttcgccgaccagctaggtaaaacaatggaggtctatatcgacgacatgctggtcaagtcagctcgcgaaaaagaccacgtcccgcaattaagagaatgcttcaaaatcctaaacaaattcgaaatgaagttaaaccccgagaaatgctctttcggagttcctcgggagaattcctcgaatacctagtaactg

SEQ ID NO: 27119 - DNA, 755 bp, Arabidopsis thaliana columbia
catatcctaactaactccattactgaatgcttaaagacactaacgcttccttcaacatatcttacactcactcgaaaacaataagatccattcaagtacactacaaaagtctccaaatcagactgaactcagaaatgagctgatattggaactgccaaattctgtgactaccagttctcactctgctaataattgatcctagctcgctatatccccagcgaatacacatttacagttctactataggtatcatcaatcatcaaacaaatgaagaatctgagaaagaacaaaaagaaaacttttctcacctgatcaagaacagtgtcagtgatcaaatccgcagcaacttccttggattcagagatcaaggcgaactcctccgacacccatttccttccagcaggaggagacacaatcccagcaaatctttgcaaatccctcatctccttttgcatagtttttgcagccttcttcttcgtcatagcaaacacaacatgatccatagtttcttcattcatataaacctcaaaagtgatctcatctttacaaggaacaaccaaattaaacaccctagagatcaaatcatgtctactcttaagctccatagtagctaacaatccatggcaatacctacgaccactcgcgtagaatttgaacacatttaaggcttcttttaacaacaatggcgaatcctctaattcactaactccaagcatactaaaattcttctggaatattgtatccttagaagcaaa

SEQ ID NO: 27120 - DNA, 1258 bp, Arabidopsis thaliana
  unsure (1)..(1258): unsure at all n locations
ctcctcaaaaaacatttttgttttaattttaaatctaaaattacggatattactaatatatccccatccgaacctaataattacccctaaaatcattgttcgtttccgaaccagagcacccgaaccacctttactcttaatttgaaaatcaaaaaacataaaccataatattttcagaaatttccgatcgaattcattcttcattttctaaccgttatcgatttctcttcccctattttctttaaattcaatagatcgattgtttcgttcttcttctttcttgtaaccaccattatttccgttatatttccgattcgaattcagtcaattcttctcgaatttcagtcggatttcttagagatgccgcttgagacgcgtggaggaggtcaacgaaaaagaaagagagaagtgccggcgaagaacgagaaagataagatgctggcgaagaaagaggaatttaagatgccggcgaagaaagagaaagaaaaggtgtcggctgaggagaattgcccggcttgagcgactgcgacggcgatggacgctacggctccaacgacagcgacagacgctacggctccaacgacagcgacagacgctacggctccaaagacggctccaaggacggagaccccgatgcttgaggatgctacgttttatgatgctctaaaggaaattaccgttgaagaaattcaagagaatgtgcaaagtgatgaggtgctggatgagaatgaaagagaagaagcaagtgaagaagaataataagggagtagtagccgaaccttgggctccaattccgattcagaggaaacggagacaaacgaggacctcgcgtgtgctaatcccgtggaggaggaggagagaggagaggagctccgagagagacgaggacgtcatagtgaaaaagtctctggaggagaggaccatagacgaggacatctcaatggaaaatgtggtaagtattccattttgtaataccgctttaattgggtaataatgcaattgtgaactatggacaatactagtaacattgagaaatactaagttgatatctaggtaatatttgcggatgtgggtaatactttagagtaatacttcagttgtgcattgtggatagtactagtaacattaggaaatgctatgttgatatctaggtaatattggcggatgtgggtaatactacagagtaatactacaattgtgatttgtggatagtactagctacattggganatactacagatatgtcctggttttaaat

SEQ ID NO: 27121 - DNA, 553 bp, Arabidopsis thaliana
tgttgaaaataactctggcaaggtattctaggttgacctgtcaattgcaaaattatagaatttagcataaaaatactttaagtttccaagcaataccgttgtccctgaatcctctacttacttgatgaactattccagatccaggaggtacgacaagcatgttgtgaaaggcgttggatccccacttaagaaaagcaaatctttccttgttacgctggaactcaagctccatgtttgcctgcactgcgttctctgatctcgccacatccacctgaacggagtgatcaatgacaagatctacagggacctgcaattatcaaggccttgtatcaaaccttatagcataccaaaagaacacaaatcattaacccaatctcagtaaaaagcgaggaaactaaccagcggattaattttattagaatcaccaccgagattattcatggcatctctcatgcaagcaagatcaacaacagcacgaacaccagtaaagtcctgaaaaacaaatagaaaaaatgatatcacattctagcattttcaggaaatcagaaacatc

SEQ ID NO: 27122 - DNA, 1011 bp, Arabidopsis thaliana
actagtactgactacagataagccacaattgtagtatcactataaggcattacccacagccggccagtctacagtcgttgcatacatagcattccccaatgctactagtactgtccacattccacaattgcattattacccaattagatcgctattacgaaatggaatacttaccacatttgcgatgtcctcggctatggtcctctcctccacgggtttctccacttggactatcacgtcctcgtttctctcgtcctaaatatcaacatagcatttcccaatgttactagtactgtccacatttcacaattgcattattacccaattagatcggtattacgaaatggaatacttaccacatttgcgatgtcctcttctatggtcctctcctccacgggtttttccacttggactatcacgtcctcgtctctctcgtcctcgtctcccttatcctccacagatttttccacattgacgtccttgtcgctcgtggagctactctcctcctcctcctcgataacggcggttaggccgtcatcttgtctctcctcctcttccacgggattagcacatgcgagttcctcgtttgtctccgcctcctctgaatcggaatcggagcccaaggtttggctactactccttgattcttcttcttcacttgcttcttctttttcattctcatcctccacctcatcaatttgcatattcttttgaatttcttcagcgtgaatttgcttcagagtatcataaaacgtagcatcctcaagcatcgggctctccgtcattggagccgtcgttggagctgtagcgtctgtcgctgtcgttggagccgtagcgtccatcgccattgcagtcgtttgagccggcgactgctcctcagccggcactttctctttctctttctttgccggcgccttaactttcactttctttgccagcatcttctctttctctttcttcgctggcgccttaactttctctttcttcactggcacctgatctttctccttc

SEQ ID NO: 27123 - DNA, 570 bp, Arabidopsis thaliana
tcgtatctctcgtcctcgtctccctcatcctccatggacttatccacattgacgtcctcgtcgctcgcgaactcctctcgtcctcctcctcgataacggctaggctgtcatcttgtctctccgcctcttccacgggattagcacacgcgagttctttgtttgtctccgtctcctctgaatcggaatcggagcccaaggttcggctactactccctgattcttcttcttcacttgcttcttctttttcattttcatcttccacctcatcagtttgcatattcttgaatttcttcagcaggaatatgcttcagagcatcataaaatgtagaatcatcaagcaacgggctctccgtcgttggagccgtcgttggagccgttgtcgttggagccgctgtcgttggagccacattggttgcatcgccgtcgcagtcgtttgtgccggcgactgctcctcagccggcactttctatttatctttcttcgccggcgcctgaaccttcactttcttcgtcggcgcctgaatcttcgctttcttcgccggcgcctgaaccttcgctttcttcgcgggca

SEQ ID NO: 27124 - DNA, 332 bp, Arabidopsis thaliana
ttcaatgccagtagagcagcgatggttgtagatttcttcggaaggagctatagtgggaaagagttccaccaactgaacgctgctgaagaagggtctccatggtatgctgatcacgtcaattacttggaagttgattcatgccagagaaaaggcaacatcagtagaagaaatgagatgcctcagaatccaatcttggaagttgatatctttgatgtatgggggattgattttatgggtccattcccatcttcatacgggaacaagtatatactggtcgccgtagactacgtatcaaatagagtcgaagctattgctagtcctactaacgatgc

SEQ ID NO: 27125 - DNA, 1098 bp, Arabidopsis thaliana
tcaaagttactagtactaactatcgataaatcacaattatagtattactctaaggtattacccacatccgccaatattacctaaatatcaacatagcatttcccaatgttactagtactgtccacagttcacaattgcattattacccaattagatcggtattacgaaatggaatacttaccacatttgcgatgtcctcgtctatggtcctctcctccacgggttttgccactatcacgtccttgtctctctcgtcctcgtttccctcctcctccacggacttttccacattgacgtcctcgtcgctcgcggagctcctctcctcctcctcctcgataacggctaggccgtcatcttgtctctccacctcttccacgggattagcacacgcgagttctttgtttgtctccgtctcctctgaatcggaatcggagcccaaggttcggctactcttccctgattcttcttcttcacttgcttcttctttttcattttcatcttccacctcatcagtttgcatattctcttgaatttcttcagtaggaatatgcttcagagcatcataaaacgtagaatcatcaagcatcgggctctccgtcgttggagccgtcgttggagccgttgtcgttggagccgctgtcgttggagccgcattggttgccatcgccgtcgcagtcgtttgtgttggcgactgctcctcagccggcactttctctttatctttcttcgccggcgcctgaaccttcgctttcttcgccggcgcctgaaccttcgctttcttcgacggcgcctgaaccttcgctttcttcgccggcaccttctccttcactttctccgccggcgccttccttcactttctccgccggtgccttaactttctctgtcttcgccggcgccgacgcttctatctcatttcttttcccttgacctcctccacgcgtcttaggcggcatgactgatttcgaatcggaaatagaacggaaatactggtgaaaggaagaagaacgatcgattgaatttaaagaaatagggaatgttgcggttaattcagcggttactaaggagaagaagaagataaacaaaaacggttgtaatgag

SEQ ID NO: 27126 - DNA, 989 bp, Arabidopsis thaliana
tgaagtgatgtcgaaaaccgtcactttcttgaggtttccgatctgaggaggtaaacaaccggttaagttgtcgttggagaggataagctcgttgagtgttttccccatttgaccgatacttcccggtatgcatcctccgagattgttgtccgcaagaaccagagcagaaacaggggaatttcccatgtttttgggaatcccgaaccggaaccggttatggttcaagaatatagcgtcaagctctctatcgaagagctttgatgggatcttgccttcaaactcgttgtagcggagatccaagaatttaagggaaggcaaagagaggacaaccttagggaacttaccgacgaatcggttgttgctaagatcaagctcgtagagaagcttcatgcggttaaacgtgagagggacttcaccgcagaaacggtttgagttaatgtggaacagagcgagatcagagaggagacctagctcggaagccaagtaaccggccatgtcagcgtggttgaggtcaatgccagcaacgactcgggttttcgggtatgaaggagaaggagcacaatagattccattgtaggagcaaacatctgaaccattccaattagctgtgaagttgaaaggatcagaaaagattgcttttttccatgattgaagagcaatgtaggcttgacgtagcttcgggttctcgaacttgagacgtttgtctactttgatatcactgcccaagtcgctttcatcgtcgtggtctgctttgatttgtaagaaacaaacggaggagagcaagagggtgaagagaaagagggaacgaagaggagggaacaacattgcttatgggtcaagaaacccaattttactaattatgaacatctaatatctctatgtgctccatctttataaaacagtttagaaattccaaagtcgtatctctttctctctctccaatttggccttctttttttttacggaaattttcaattagtgagctctag

SEQ ID NO: 27127 - DNA, 644 bp, Arabidopsis thaliana
caggaatcaattgcctttgggagatctttcctttccaaatttgctaatgaagtttggtggattctctaattaaaaatcaatggacttctcttgaagctccggcggtttccggtggttttagagttccctgagttgctaaccagaacggtggtgaatggcgacaactaaggcttcttcagtcaacgtgtttcaactttgtttgttaacatcacacgtggctttgtggtggaagggaatctttaatttacttcctctaaaggttttgtttcctggtttgggctttctttatgggcctctgcttataagttagacttgttggttttttatgtaatatggatgactatattttagttgatccaatgttgtaaggtttaatatgtgtcaagatttgtaagtggaaggttccacagttgtatctttacaacataaggttttaaataaagtgcaacacttatgagaaaaaaataataaaaatacaagcagatccaatttgacaaaaccaaataaataaccggtttaatatacccaaatgaccaagttttaaaccaatgttccttacatttcgaatgtctttttttcagatggtctttgattgctgggaaattaccgggaagaaccgataatgagattaaaaattattggaa

SEQ ID NO: 27128 - DNA, 1255 bp, Arabidopsis thaliana
cttgccatatctctcaaaggagaaagtcaatgcaagaaatttaatgctgcctcccgctaaagagaacatcaacgtggttcgggtcacgctcgagttgagtgaagcgaacatcaagaaacttaaagaacaagccaagaacgagtcaacttggtccgatcttcttctatcaacgtttgtagtcacgtacgaaaaatcatctggccagtcccttttttgtaaagaggaagccaaaaaatccttgtaaaaaactgaaataatttttgttttttttttaattcgaaatatatggatattactagtatatctccatccgaacctattaattaccagaaaaaccatggttcgtttccgaaccaaaccatccgaaccacctttactctttatttgaaaatcaaataaaaaaaccctaatatttccagggatttcccaattcgaagagagattttttgacttcttctccttagtaaccgttttcgattttttgacttcttctccttagtaaccgtttcaactgcaacattccctatttctttaaatttaatcgatcgttcttcttgctttcaccagtatttccgttctatttccgattcgaaatcagtcatgccgcctaagacgcgtggaggaggtcaagggaaaagaaaggagatagaagcgccggcgccagcgaagacagagaaagttaaggcgccggctgagaaagtgaaggagaaggtgccggcgaagaaagcgaaggttcaggcgccggcgaagaaagagaaggttcaggcgccggcgaagaaagagaaggttcaggcgccggcgaagaaagcgaaggttcaggcgacggcgaagacgactgcgacggcacaaacgactgcgacggcgatggcaacgacagcggctccaacgacaacggctccaacgacggctccaacgacggagagcccgatgcttgatgattctacgttttatgatgctctgaagcatattccggctgaagaaactcaagagaatatgcaaactgatgaggtggaagatgaaaatgaaaaagaagaaggaagtgaaaaagaagaatcagggagtagtagccaaaccttgggctccgattccgattcagaggagacggagacaaacaaagaagtcgcgtgtgctaatcccgtggaagaggcggagagacaagatgacggcctagccgttatcgaggaggaggaggagaggaagtccgcgagcgacgaggacgtcaatgtggaaaagtctgtggaggatgagggagacg

SEQ ID NO: 27129 - DNA, 1571 bp, Arabidopsis thaliana
tgcgacagatttaagctcatgtggaaaagtctctctttttcttttaccagaagccctattacaagaacacacctatcctggacatggtggagactatacctctctctctcataatgtcctcaacaaaaacacttcagagatcatcacagaagcttcaccacatagaccgcaagtcctaagttccttgataatcctaataagaagctgaccatactaaaactaaatcgatatgcaaaccaaattgcaacttacttactgtgctatacttagaatctgctaatgcgctatgcaacaagaatttattgacatgcccaaattttcaagaaataattctataggcatactatatgtaaaaataataatctgatctggaatgtcaagtaactttcgttgcggcatttttacgaacactttgtatgcagcttttactcaacatgagacatatgaaagattcgacatttttgcaacaagggacaaagagatatcgagatgggtactgaaaaaacttggctttgaactagaaagatcattctttaagcaaatcaatgaccaaatcagaataattttgttcgatgattgaaactctaagggaagagatgaaaatgggttaaagagatgaggagattgcagatgtaaacgtaccagatcaagaggggactgagtagacaaaagagactgttttgatctccacggtcttccaaaatcgaaaaatcgtctggcagtcctttttgcaaagaggaagccaaaaaatcattgtaaaaaacagaaataatttatttattttttcttaattcgaaatagatggatattactagtatatccttatccgaacctattaattaccagaaaaatcatggttcgtttccgaaccaaaccacccgaaccacttttactctttatttgaaaatcaaataaaaaaaaccttaatatttccagggattttccaattcgaaattgtttcttgttctcattacaaccgttttcgattttttgacttcttctccttagtaaccgctgaaattaaccacaacattccctatttctttaaattcaatcgagcgttcttcttgctttcaccagtatttccgttctatttccgattcgaaatcagtcatgccgcctaagacgcgtggaggaggtcaagggaaaagaaaggagatagaagcgccggcgccgacgaagacagagaaagttaaggcgccggcggagaaagtgaaggagaaggtgccggcgaagaaagcgaaggttcaggcgccggcgaagaaagagaaggttcaggcgccggcgaagaaagcgaaggttcaggcgccggcgaagacgactgcgacggcacaaacgattgcgacggcgatggcaaccaatgcggctccaacgacagcggctctaacgacaacggctccaacgacggctccaacgacggagagcccgatgcttgatgattctacgttttatgatgctctgaagcatattccggctgaagaaactcaagagaatatgcaaactgatgaggtggaagatgaaaatgaaaaagaagaaggaagtgaagaagaataatcagggagtagtagcca

SEQ ID NO: 27130 - DNA, 469 bp, Arabidopsis thaliana
acgtggaatcaatttcatttcttattctctttgacaacagatttacctgaagttgttcacgtcacgccggatagcttctaccaactagatacaactcggacttgggactacttaggcctttccgtcgccaatcctaaaaatcttctaaatgacactaatatgggtgaagaagttatcattggcattgtagactcaggtttgagtgtttagttgtgcatttcttttttgctacatggtagatggatttaagttctcttgttgcttttgtttcctctatcaataaatcattttctgaggttgtaggagtttggccagaatctgaagtctttaatgacaatgggattggaccagtgccaagccactggaaaggaggcttgtgtatcaggagagaatttcacttcctctcagtgcaacaaaaagcttataggagccaaatacttcatcaatgggtttcttgcgacgcacgaaa

SEQ ID NO: 27131 - DNA, 584 bp, Arabidopsis thaliana
attcggaaatgcctgaagaacaagtcaacaaggggttacagctttggatcaacctcccttctagtgccaaaatgtataagaagattcttcacaaagattcatctttcttaattcacagattttttaaatgtttatataatacgttttctttgattttcgacaggatcgagcctaaaaatatagaaatctcgagttcagagatacctagcgcagatgactatggagtagaggtcaaagtcattgctggagagtcaatgggagtcaaatctcctttctacacaaaaacaccaatcatgttcctagactttacgctcgatccaaaagctcaaacccaccaggccgttccagagtcatggaccgcctttgcctacattgtagaaggcgatgaaggcgtttttagctcctcggactcttccacagtacaagcacataatgttgtggtgtttgggacaggggatgaagttagcgtgtggaaacgtcaaactctaggccgttgaggttcttgttgattgcaggggaactgataggcgagcctgtggttcagcatgggcgatttgtgatgactcacaggatgagattgaaat

SEQ ID NO: 27132 - DNA, 747 bp, Arabidopsis thaliana
cggctgcgactggcgggaatgccggaggcggatattcgccgcctgatcgccacgcaaaaaatccagactcgctttacgctcaaagcgcccattgatggcgtaatcaccgcgtatgatctgcgcgcgggaatgaatatcgccaaagataacgtggtagcgaaaatccagggtctggacccggtgtgggtcactgctgcgatcccggagtctatcgcctggctggtgaaagatgcctcgcagtttaccctcaccgttccggcgcgaccggataaaacactcaccatccgcaaatggacgctgctacctggcgtggatgccgcgacccgcacgctgcagctgcgtctggaagtcgacaacgccgacgagggctaaaaccgggcatgaacgcctggttgcaactcaacaccgccagcgaaccgatgctgctcattccgtcacaagcgctgattgataccggcagcgaacagcgggctgattaccgttgatgccgacagggcgctttgtaccgaaacgcgttgctgttttccaggcatcgcaaggcgtcaccgcattacgctctggtctggcggaaggtgaaaaggtggtttccagcggcctgttcctgattgattccgaagccaatatttctggcgcactggagcggatcgctctgaaagtgctcccatgcgcattgagggaataccaatgattgaatggattattcgtcgctcggtggcgaaccgttttttggtgctgatgggcgcgttg

SEQ ID NO: 27133 - DNA, 740 bp, Arabidopsis thaliana
atgaatatgttccttctacgagacgtgttaaactctcagtctctttctccgttaaccactttcgcttacccgccttgtaatctttctaacgtaaacgacgttgttcacgagtccttcactaacgtcacgatgtctgtgaagatctctcgcctaaagctaagaggtcaagtaccattgagaacgagagcctgatatcaaatatctttgaaccagaaccagctagttctggtcttcttcaagaaattgttcaaggcttcttaccaaaacctatctctcaacatgcttctatacctccaaagagcaaccaacagtcggttggtgttttcccgacgatgccagagagcggttttcagacagatgttcgtttagctgacttccatgtcgaaggaaacggattcggtcaggttaaatatcatggagagttaggttgggctgatcatgagaatgggtttgattcagctaagatgcagcagaacggaaatggtggaatgttttatcagtattgctttcatgatgattattagaatattgttgttgttctactttttacgtgcttatcacttcacagtttctttagggttgtaagaaatgaggttaagggtaactaactcaaatcttttgtcttttaatttttcgtctagtgctatgatcaatttatctctatgttttagcaaagaacaatttttatctgagtatgagcgaagttaattaattgtgtatgacatatgtcggttatgagc

SEQ ID NO: 27134 - DNA, 834 bp, Arabidopsis thaliana
ttggaataaaaaatgtaaagttgatgcttccatataaaataaaagtaaaaatgagtaattcatgccaattaaattagcgagacgcaaattggagacagagataactgagcggagggattcagatctatacgacgaaactgaatctcaccgtcttcttcttcttcttcttcttctagacgatccttgtgtttctcttgctctcgcatccacgcttctctggtaatgctactgatcgtcaccgtgaagctgagcttgatcgcttccccttgtgaactgatctgatctgaggtgaatctctatttcttctccttcttcattgtacgaatctcgatttctcggatcttgctgcttcttatcgttagatctgttttcaatttcacgtggattacgttttttttcttccttttgcgggtttttcgatttctttgaactgatctttctccatgattttcattctctgttgatctggtttttgtagagttgtttctgtttcgtaatctgtgaatatgctgaccaagttcgagaccaagagtaaccgagttaagggtctgagtttccaccctaaacgaccatggattctcgcgagtttacacagtggtgtgatccagctctgggattatcgtatgggtactttgatcgacagatttgatgagcacgaaggacctgttcgtggtgttcatttccacaactcacagcctttattcgtctctggaggtatgctttgttattggtaggccaataagtctgtttattacactttcatgatcgataaatcctgatctgcttaagtattaacccttagctagttagcttcctcggttcctagatctagct

SEQ ID NO: 27135 - DNA, 534 bp, Arabidopsis thaliana
cagagttgtagatgaatctgaggaaatcaacctgatctgcaacgcctcattgatgcaattagatgaatcagctgaagatgaatctgaggaaatcaacttgacctgcaacgtttcaattatgaaactagatgaatcagatgaggacgagcctgtagtagcaaaggtggcctacacatctacagatggatcagcaagcaatccttggtatttcgatagtggatgctccagacatatgacaggtaacccaggtgttctttcaacttatactgaagaagcttgtggaaaagtaacatttggggatggtggtaaaggacatatcaaaggcaaagggaatatcgagtgtgttgataaaccaccattggcaaatgttttattatgttgagggactaaaggctaacttgattagcataagtcagctgtgtgatgatggcctgaaggtgacgttcacaaaaactgattgtcaagctatggacgagaataaaaatgcagtgttgtctgggttacgttcaggaaacaattgctacatgtggacga

SEQ ID NO: 27136 - DNA, 776 bp, Arabidopsis thaliana
tctagacacatgattggtaacccaagtgttctatcaacttatactgaagaagctagtggtaaagtaacttttggggatggtggtaaaggacgtatcacaggcaaagggaatagcgagtgtgttgatcaaccaccattggcgaatgtgtatcatgttgagggactaaaggctaacttgattagcataaatcagctgtgtgatgatggtctgaaggggacgttcacaaaaactgattgttaagctatggacgagaataaaaatgcagtgatgtctggtttacgttcaggaaacaacagctacatgtggactacatcagatacttgtttgtctgcaactgtcttaaatttggagttgtggcacaagagacttgggcatatgaatgttcagagtctggtcaaaattgtgaatgcaggagtagttcgtggtgttccaaaactgggagataagctggattatttgtgtagtgcctgcaacaaggggaagcagatcaaggtcaatcataaaaagggtgtctgaaatcggatcaaagaaaatacttgagctaattcacatggatcttatgggtccagttcaggtggaaaacataaatgggaagaagtacatttttgtattagtagatgatttctcaaggtatacatgggttcgcttcttacgagaaaagtatgaagcagtagagagtttcaagattcttgctctgcaacttcagaatgagaaagggaacattgttcaaatcagaagtgaccatggaggggaattcacaatgagacttttgagaa

SEQ ID NO: 27137 - DNA, 560 bp, Arabidopsis thaliana
aaaggcaactccattgtcagacacagtgacaatcagcttatcgtcggagttgccagtggttgtggagtataaggttgctgagatgggttacattcgttactacttggctcctaagattgaagaagaagaagacactaatccctaagaccccttttatatccacaatttctcttcattctaaaatgttgaagatttattgacaatgttggtgtttttttttggtgagattcctttgtatcccccctctagaatcagttgttttcttgacttattatgttttatgataacaaagttcagcaaaattagttgtcttgaaactatgaccattcatcaacaaactaactccactttgcaagataatttatacactaacacaaccgtagttgcctatacctggatacttaaactgtatgtgaacattgacatgaaaaggtatattggattccattagacttctcaacatcagttctttgacaccattctgtactctctggctacatttgtgtagtacatgcaagtgcacaagacagtgcatcaggtaaacgtagtataatacaagt

SEQ ID NO: 27138 - DNA, 1383 bp, Arabidopsis thaliana
gggttacctccaaagaaaaatagaaacaaaaaatggggaattgtttaaggcatgaatcagaaatgcattgggctggtgaagactgggatgaattcatcacagaagatgaagaagatcatcattatagctctaaaaccacaagagatggcaaaccagtaattgtaacacgtgacagtaaatcctctgttccatctcatgagatcaagatcaggctcacgaagaagcaactccatgatttactgagtaaagtcaacgtccatgacttgaccttccagcaacaaaccttctcatgtccaatcctgaacaatcgcgggtacgaagaagccaatcaacaacggttatggagaccggttctacagagcataccagaagttaactgagttttgttttcagagatggccatgtttgtatatgcttagggtttcttcactttcttgatatgtgttagggtaagagttttgatgtaaattttggtttggacacatgacgcttctgtttttgtttgttagaatgtaaataaaaaagcataaaagcagaatcaaaaagcttgttgttaataccaggacttacttgatttagctgaaacttgtcatgacatgaaacctctcttctccgttgttgatcctctctctctttgactatccgccggagctttctgtttctgtttggcgttcgcgggaggaaaagaagacatattatgggctttagaagcccaaattcactttactcgtccaacgaaaaagaaacaagacattaaatatgatttattaattatcatcccaatgcgtttcgttttttccctcccctaatattccaaaacgtcttgaattcatcattactagtttcctttccttagtaaaaccctacatttctccgcccgcctttgatttctccccggccgttcccgccgccggtctccgatttaaccaggattgagtctaattccttctttttgtgctcattgctgtcggattctctaccggcgttacatcgaccagccagactcttccccatttgactgctttactgattcaatcgctcttttaggtctgtgtaggttttgaaattctgcggatcagattctgaatttttttctttttcgatttttgatttacgattgattgaaattgaaatttgttatagtttcggattatggtaactactttctcataattttattataattgagattaaggatcatttccatagagtacccaaggttttgattcccctctatccatctaagacaattgaattcaggattcaagtaatgtttagatcttatatgaaagcaagtggatatgtaagagagggtacaatataatctgaacaagtatcgttggcactacctgatggagtgtggatcttgtaatcactttagag

SEQ ID NO: 27139 - DNA, 917 bp, Arabidopsis thaliana
gctgtcatcatcctctcttatgtgcattctctgtcaaaaagaagactgcagaaacagaaaggtatttttcttttctctccaggattattgtgcttgaggagtggttttggtgtatatgaagaaatgagtagtggtatatcgggtttgctttgattctacgcttttgttagatggggaaattgagccagtggaagctatgtgtcgttttatccaataaaagaagaagaaaaccagaatctctctgcttccttcttcatcctcttttactttaactgagaagcagtttcaggaatatttgtatcaatcaagtttcctcttttcttgattgaagctgaagatatttgaaattaatggcaagtggtggggcatatcctaaagatttttaatacaaatagtgaatcatgtaacaacagtagatgatgtagcataataccctaatcttcgttctataaaattgaccaaataaaaggaaagcaaaatgttaggaagaaacaagaaaaacccactaaactctcaagtgtacaaccaaaagactctgctttaaaaaaaaaaagtaaaggaaaaagaaagagcttccgtgtgtgacactttccaactcaactcactcctatctctggcgacgatgactcactatctgccactgactttgatgatgacaagagacgcagcctctggacacgcggcgggagatgcttggctggttttcttgacactggcggtgtccacggcaagaaaactccagtgccagcgtctagcctcttgggcgccggagctagcatcaccagaggagaaggggtgcctggtctccatagggtgggcggcggctggaccttaccggagtccggtttgagtttgaagaaggtgattgcgactcttttgttgggcgagggacacattacatgcctagccatatctgc

SEQ ID NO: 27140 - DNA, 566 bp, Arabidopsis thaliana
tggaagacgatggtcagagctccgtcgccgaaaccctagatccggcattgcagaagaagcaccatgatatgctcgagcgtctctccgctcgtcaccaagctcgaaaatcagattcacctgactcttcctcttcgtcgtcctccactcttgaatcgacttcctcgtttctcgctaaattctccgattcaaagcgatccatcgagtctcggatcgccgagtcacgactcgcttcctcctctacggattcgtcaaagcttaagtcggatcttgctgagatctccgtagccattgacaatctcgagaagcttctcgctgagaactcgtattttcttccttcctacgaggttcgatcctctctgaaaatcgtatccgatctcaaacagagtctcgacattctctccggcgagttagtcccgaagaagaaattctcgttcaagagcaaatcaacgaccaaaaagccggaatcaaaactcccggagatacagaaacccgacgtcgttttactccgaaactcgtcccgtacgcgattctccgggattgagaacaaacacggagagactcttgtg

SEQ ID NO: 27141 - DNA, 759 bp, Arabidopsis thaliana columbia
aatagctttgtattaatatttgcaattttctaacttgatggattcagaaaagaacccaagaggtttcacttcacatacatgtatttttgaaaaataaccatgtcacttttacaattgttttttaatattaacaacggacggctacgatggaaccatcactcgaggaaatcgcgatcctacaattacatttagccgcgattcggtgagtaaacaaaccgagaacccgaacccgacccgccatctccagcttcgactctatttccactgttgacccggaccgatccgaattttgaaattgggcggcggagatttgagaactagaggccgccgcgagaggaaacgactgaacggagaaagtagctaacatacgcttggttcgacccgattcgatctcaccagcaggtacgaaggtataaccgatccggtttccatagtaaaagagctggattacattgttgtagtgtgagaaagctgcgcggttagggtttctaacggcggagaattgagaaaaggtgaaactaacggagctattagcgacggagaatgaaggaaccttgacgctagtgacggagatctcaggatctctcggtctaaagactgtgagataaacagtaagtgcggcgatgattaagaagactatgaagagcgtggcgacggcgcatgaagcgaggtttgaacaagacttcgacatttctcggtggagatgtttggtagcgatgatttaagtgttcactagttgggataaagagtttatttttg

SEQ ID NO: 27142 - DNA, 449 bp, Arabidopsis thaliana
cctgttcttatcccacaaatgcgcttcgtatctcccagtccatctatgcctattattattcaacaatcggaacaattaaattacctgataaagaacgatgtcgtttatggtattatgagaggagagagaccttgtgacgcctctgtaaggggagctgcgttgaagaggagcgtttcgaggcggcgacttacgtttgcgtttggatgttaaggcaatggacgcagactcagacgcagacgctgttttatcgctgatttcatcgtcaacgattgttttcttgctcctcccagagacttttgccattaccggtgaatgagaagaataaaagattgagagacaatcctgaaaatggaattatgaaaatgagagacagatagttggaaatggttgagtatatttatattaaatccgtcacatcttttttttcgtttatatatatatatatatat

SEQ ID NO: 27143 - DNA, 494 bp, Arabidopsis thaliana
ctcaagtgcatcggatgtctccgggattgagaaacaaacacggagagactcttgtgaaaagcttcgaaggctcgtcgatcggagaattcacattgtcggatcttgattcatgtcaagtaaaattaacaggaacggtcaacgctctgttccttcaccgactgaagaagtgtagtgtctacacaggtccagtgattggttcgattctgattgatgacgtagaagattgtgttctggtattggcgtcgcatcagatcagaatccattgcgctaggaagagtgatttctacctgagagtgaggagtcgtcccataattgaagacagtaacggtgtcagatttgctccttattgtttggattacaaagggattgatgaagatttgaagacggctggtttggaggaggagactaacaactgggccaatgtggatgatttccggtggctgagagctgtacagtcgccgaattggtcacttttgccggaagaacaaagggtc

SEQ ID NO: 27144 - DNA, 505 bp, Arabidopsis thaliana
cggatgtccaacggttgcttgttaatcattttctcaatctccagcagcttcgaatatattccaattcgttccatataaaagagcttctcatacacatctctaacagtctcttttacaagctgggagtcactacattctttcctgcgtcatatttgttcaagaaaaagaaatgcacttcatagaaacactacacataaacttgaaactgaaattgtaatgcactttttaagatttagagcttatgatctcagttttaactctgttaggtattaacatgactacacatgaacttcaatggaagaattcactgatcaacacaaacaaggtagtgaaagacacttgctctgcgattcatatataactgtgaatagcttcacagaagaagatagtttatgaatacctggaatggtgtactgatgagaatcctttcgaatccagcgcgctaagccattcggtctctgatgatctgacaccgtacaacaccggaaccaccacttgatctttg

SEQ ID NO: 27145 - DNA, 727 bp, Arabidopsis thaliana columbia
ctatcaatttgtatgatatcaggcaagagctctggtcacaaaactcaccgaggaaaagaactctgcggttcaactgaacaacaggcttcaacaagaattggtaagcaacttttaaactattccttccggtggttggtttaagaatcaaagaaactatttgtctgaaatgggaattgatgattaacactttcataactagttacccggttttaggagtagcggccattttcttgttatctgagttgttagatttaagctcaatgaagtctatgtaccctgcttttcttttttgttgcgtaacaaggacctctcggataacaaaagatttaatattgcaggaccagttgaggcgcgaaagcaagagaagtaagagtggtggaatccctttcatgtacgttcttctggtcggcctaatcggtttaatcctgggatacattatgaagaggacatgatcagatcccttcaacaaaatactccaaaagtctcaaagtgcttaaaaaagcattgaaaaggaaagaaatcaaattgtgtgaggaggacaatcttctcttctgccttatcgtcgtcatgcacctttggttaaaatctgaacttagtgcgttagaggatttgtattacggtttccataagacttagaattgtcacaaaatctcctttttcctctctcttattacaactttgtgtagtcttaaacacttttgtttcttcgtcttctctcatcttaact

SEQ ID NO: 27146 - DNA, 616 bp, Arabidopsis thaliana
tctataacccagtaagtccatctccatttcttttgtttatatatttttagttccatcttttgtaatatgttggacatttctaaagcaacttacatttcttaccctcacagatttcagatatcgaaagtcttgtggtggctccaatatcaaaagcatctgcaaggcaaaggtctggtagggctgggcgagttcggcctgggaagtgttacaggtaactctcaatccgtttattaaagtacagaatttcgtctgatatagttgtttagtgctcattaatcctcttcctgatatttttatggtaactaggctttacaccgaagattattttctcaaccaaatgcctggagaaggcataccggagatgcagaggtcgaatcttgtttctactgtaatacaggtactagacttgctcaactcttgtcatttagtttttttttataagaactcaaaagttgggaggcgttacgcaaaaccacacaagttttttcttttcaccttttctattaagtaattaatatccagatgagaggaagctcttgcttctagatttctcaaactctgttgatctttttggtattttcagctaaaagctttgggcatagataatatcttgggt

SEQ ID NO: 27147 - DNA, 782 bp, Arabidopsis thaliana
catctgaatgattatctcaaagtcatacatgttcattctcaatcactgaaaagcatcatactagagtctcagcatatattgaatatgatgatcttgtggttaaaattgatgctccgagtcttgaatatatgagtattcatgattaccaatctaaaagctttctaagcccattccaactctccttcaatatgatactttctgctttgggcctacatgctcaacccgtatggatttgttattggcttcttccaaaatgcctcattctagttggaattggacttgacttatatattagacacttattttctaaactttcgatatgggatgtttgtttgtacccaataatctccccttcaaaccaagaaccacggacattggacctctttttaagcgaaactttggtacccttaactcggcaccttcttattttcgaagttcttgaatcactttcttatcatgtcacatttaatggcttcttccacaccgaacttttagcccacacccctaaatccattttttcaacctaggctgtgatactatttagtgggttttctaagtcattccaactctcaattagtataatattgtccgttttgacccgtacatgccaaagcccgcaaggatttgttattgggttcctcccaaaaagcttcatactaattggagtttgactagacttatatattagacccttcttttctaaacttctaatgtgggacgttggtttatcaacaacaacatagtagtggttctctatagaggtaacgttgatgttgtgtttg

SEQ ID NO: 27148 - DNA, 714 bp, Arabidopsis thaliana
gggtaccgagagtgaataaagtacttcaagtgctaggatcattgcttcatgggacggaggcgcaggcattcgaaaccaagatattatctatgcctaaagcttttagctgaaaaaaccaaaaaatcaacagagcttgagcaatttagaagcaagagctctcccaaattttgtgttcttaaaataaaatgaagctaaatgacaagagttgagcaagtttggtattacagtagaaacaagattcgacctctgcatctccaggcatttggttgagaagataatcttcgttgtaaagccacaattaagactatgttttactgcacaatgacaaataagagaaggttttaccaacacgatttactcataatctgaacagattatacagtgcaacaaaatcattacctatactttgtcaagaggggatcctccatcatctctcgaattagtaccccatctgtgagaaattttacactagtcacaccctgttgtaaccaagcaaaagatcttgtaagcatcatcagaatactccatacataagaaaaagtagaagagcgttaaggaaagagtctgacggaagttgtatgatcttcaaatcgaatagtgtagccaacttcctccccaagattcactcccatttcctcggccactctcgcagaaaccgcctaagcaaattacaaaacaaagcatatatgtgatcaaatataaaaacttgagctg

SEQ ID NO: 27149 - DNA, 1500 bp, Arabidopsis thaliana columbia
tccggttctgtcggattcgaagaaggtcgcgtgactgcacgcgcggcttgtagatctaagcactgacgagcccatgattgaatgcagaaaaggtgaaagacggcgacatggaggaagtgcaggaccatgtaggatcggttcgtttaatgcgttcgagacagataaggcacgagacagcaccggaagaagacgaggcgagaaaagattggatcttagcgagatcgattgaggaaggggacgaagatgagtggcaatcgaggtaagcttcgaagatggagtttgatagatcattgtgacggtgctgatgattctctgaatcagatccggagtctgaatctgaatctgaaatgggttgctcttgtgacggaggctgtggtggtgatttccaccggaactcggtggtggcggttcggccatattagtcattcttcttcttcatctccttcttaaggacaaagtccagaaatttgggggggaataagaagaagaagaagacacgtgatgctctcgtgagcattgtaatgaccaaattaccggtttactttggatttaccggcttacttcacacactctcccgcttatccccaaggccttctcgcgtcaccttctcgaagttgataagcacgatcacttatctatgattatcctcttttccttttttgcaagagaattaagtcatttaacatttccttaacatcattccgatttaaaacagattatctaactcgaaaatacagctactcagttttgaacacggtaaatcatcgaaagatctcatatacaaaaggatctctaaactcaaatcaaagtcacagggcaaagcataagaaacttgtggtagattcaatctatgaaggcatgttggagctcatggcttgatgtattctcgaatgaagtcttcaatctggatggtttctccggtaagtccagatgcctcagcgacagtgactttgttggagcaatgcgtgaaggagaacacttctccctcaattccaatggtgaagtcattcgctatatcagcagtagagactgcactccttgaagccctcagtttctcactgcaaaaactcatcaaccaatgatgattagcttttatgcaggaagataggctctatatataagaaaattttgtcaagaaaactgaaattcttacatttctttctccatttgcttccggataaactcctcggtgtgtgcagtgagtttatcggtcttgttacagcaaaggaggactggaatcttcttcttgacaacattcgcattggtcagaatctcgtataggtacctatcaccatatgaaaccatggcaatgcctcattttcaacattgagatgcaaacatatgtagacatgtctcttatctgtgtcttacaatgcgtgtgtgtggaagagagagggtgtttgaaattactctgaagctgcacgatagtttgggaggaatcctaggcatcactacgaacacaatggcagctgcttggggcaagaattcttctagcttggg

SEQ ID NO: 27150 - DNA, 544 bp, Arabidopsis thaliana
ggtggatgatattttctgtctcttccaaggacacattgagaacctaccgtttctgaagcagcagtatggactgaacaaaatcacaaacgaggccatcattgtgattgaggcttacaggacactacgtgatcgaggtccttaccctgtggacaaagttgttagagatttccatggaaagtttgcgtttatactcttcgatagcgtcaagaaaactgtctttgctgctgctgtaagtccagcagctatacattcttgatctcaatgtttaagtcgcggaacttgatttacttgttgtcaatgtgcaggacgccgatgggagtgtgccgttcttctggggaaccgatgctgaagggcaccttgtgttttctgataacaccgagatggtgaagaaaggttgcgccaaatcttatggtcctttccctaaaggtaccaactttactccaaatgtttttgactctttttaagataaatagaatttacctattagaaagataggtattaagattttgataatctgatccaagactttggttgtatgtgtgat

SEQ ID NO: 27151 - DNA, 687 bp, Arabidopsis thaliana
tcaatctggacctgtagaaacaaaaaggtctttgaacagaaacacctatcgagccgagatgtcatatctcaagcaatcgtggctgcaaaagagtggttcttggctcagcctttacctcagggaattcagactctgcctcccagcccttttgagccggttgttgaatcggatgcaatcttgtgtttcacagatgcagcttggcgagaggactcacttgaagcgggattgggatggatctttgtggataattcaaatcattctgagatccaggatcatgcagtggcaagggaggtttcttcccccttaatggcggaggcgatcgctcttttctcggctatccaacaggcgtcaaatcgcggattcaaaaaacttgttgtagcttctgactcgcagcagcttgtcgaagcaatcttgagggagcttcatccaaaggagctccaagggattctacatgacatcctttttatctctctcaatttcgttgctattagctttcaatttgtcaagagagaaaacaattgtaaggcagatgcagttgctaaagctgccttactcgcaatcaattctgtaccggtttaaagttaatgtaaaccaggattttcgaaaaaaaaaaaaacaaaaaaaaactctatggaacctctttctattaaaatttcaaggtaccgaacttatttttgcaaaacaaac

SEQ ID NO: 27152 - DNA, 767 bp, Arabidopsis thaliana
caaaactcgagttccatacaaaaacttacaacaatatcaggagctgcgactatcatataatcgtaatctcacatacagcaacaacaactaacaccaaagtaagagactttaacatagcaaatcaacaacggtatgaaaagaactaagctcgcacatataaagctctgatgatttagaatcaatcatcagttaaacttcatcacatgatcataacaatttgaatcaaagtatgaacaaagaaccgatattttacacagaatcaaaccaagcctaagatattttctgaaaagtttccaacgtattcgaccaattgaattaggttatacatcatatagagaaatttaatcgagaattacctaacaccggcatcgccgacaattccaatagccataccggcggagagaccagcgagaccacaagcaagaccggaagagagatgagcatagccatcgaatagatagtaagacttggccttagggttgattccggtactgatgataacagcaatgatcaaaccataaatacctaaaactccagccataacaacaggaacaatcgatttcatcacaagctctggtctcatcacacccatcgacgctacaccaaccccgcatcttcgctgtcccgtacgctgctcccatacctgaaacataatccgatcgaatcggatcagatcagattcggctcaaaatcaattctgggaaaaaaagagataagagatcgggggaatggagaaatcagatggtacaggagaaaacgagagcggc

SEQ ID NO: 27153 - DNA, 822 bp, Arabidopsis thaliana
caccgatctgtgtgttctcatgatttttcttagaaatttctctctagatttgtttaggctaagcgatatcactgaactattatatgtctctccttttcgaaaattctagttaatattctttagtcagtggatcaaattcttatggaactgctctacgctggttttaaatcctttttctttgtcttttctccattggtgatgtagtctaggctgatcttctagaaactaagactttttggcttagatctgtatgtgttgaatttcttggtgtccccgacaaaaaaaaaagaatttcttggtgtcctgttctttgtccaacatatcgaaattacctagggaaatttgctggagttgccaggttttgtgattgctgtgactggtactaattgcataagtacagatttaccgttgttaccatcaaaattgctgagttgctttcatctatgtcaattatgctttttcttcatatcgaaggcatgttgattacttgtgtaaaccatagttagattgtgaccttaaagagtgtgtatctttgtgttattaacaaggtatgggagctgcgtacgggacagcaaagagtggtgtgggagtggcatctatgggtgtgatgaggccggagttggtgatgaagtctattgtcccagttgttatggctggtgtgttgggtatctatggtttgattattgctgttatcatcagtaccgggattaaccccaaggctaaatcctactacctcttcgacggatatgctcatctctcttctggtcttgcttgtgggctagctggtctttcagctggaatggccataggtatcgttggcga

SEQ ID NO: 27154 - DNA, 1068 bp, Arabidopsis thaliana
ccctaacatttgtttgtgctctcattctgctctggactgaccagctcgagaagataaaatgatgcctacaattaggccgtatagagcgagcgcttccgcaaagataaggataagaatcatcccaacaaatagcttaggctgctgagcatttgccctgagagaatcgcaaaaccaaaaacaagtcaagatacagatgacgttaacgttttccattcaaacattctctgtgaggaacaaacctaacacccgcatcaccaacaattccaatagccataccagctgagagtccagcaagaccacaagcaagaccagacgaaaggtgagcgtatccgtcaaataggtagtaagacttagccttaggattgatgccggtactaatgataacagcaataataagtccataaatacccaaaacaccagccataaccacagggacaatagacttcataaccaactcaggtctcatcactcccattgaagccacaccaacaccactctttgctgttccataagcagctcccatacctaaaaccaaaatccagtaacaacatctcattttacgcccgacccaatcacaatcacaaatcaatacctaaaatccagattctgatctaagaacactaatacatcgatcaattagtaggccaacgattctcataaaaagtctctagaagcaatcatctggatcagatcaaagggaatgatacgaattggaagagaatcgagtgagaggagaaggaaatggcgtacaggagaagacgagagcggcggcggcgccaaggaagccgaagaacggagcagtttcatcgccgctgaacgtagacatcttctcggatctcaaagttttggatcggatcgtttgaatctggagggagagagagagaattggattttgttttcagatgagtggaagagaacgacgtagtctgtttgtataatagagttgttgttgaacacgttgtaattttgggccgggtcgaaattaaagcccatttatctttttccataaacgggtctacatgggctattttttacaacagacccatattgctaaatgggctattaaat

SEQ ID NO: 27155 - DNA, 837 bp, Arabidopsis thaliana columbia
gacaagaaagcagcctagtcctcggatacctatcctttgttaactcagtcacagaattaaaatacttcccagactcaagtccaacaaaatcagaaacagcttcaggattattcttcaaaaccgtagctaaagattcaagacaagcttctctttggcttaaagaaccatcaagaaggataacaagcttctccaagacaccagcttcacagagaacccgttgctctacacttgttccacaagcatgagcgataatactcgcaccaagcccactaacgttctcattctcactattcaacaacgagaaaagaaactccatgtttttctcttgaagaaaatcatactttggagcttgattagattgaaatatcattctaagcgaacgagcccccgcatctactacctgaagaagaatcataaatacgaaacagaagcaataaggaagccataagaaagcaagacaagagaggatccacaaaattctaaaggccaatgctttaattcctcagatgcagacaattcaaaaaggtgaaaactttaaccacaagtcccaaactaataagattcagacaagagtaattctaaatcgttcaagctttcttttcaaagacccacaagtaattctaatgtcatttcgaatctagacacaaatttgggggaaaaggattagactttaacaaaaaaaaaagtcaatagatttattcaaaatcaaaccttttcgtcagtattagtgagaagacgaagaagatgagggaaaacgccggcgtcaagaacagcttgaacaccggcttcaacccacaagcgaaactgccaagagccgctgcagattgcacgaggatg

SEQ ID NO: 27156 - DNA, 1190 bp, Arabidopsis thaliana
agctctagactggccagctcgtgaggaaagaatgattcctacaataagcccgtaaagagcaagcgcttctgcgaaaataaggataagaatcatcccaacaaagagcttaggctgctgagcatttgccctgaaaaagaatcgcaaaagggtaagtcaaacaccaatgttacatatcttccataatacctcaaagcgtatcagtagcaggaggacgagagacaaacctgacaccggcatcaccaacaatcccaatggccattccagctgagagaccagcaagaccacaagcaagaccagacgagagatgtgcgtatccatcaaagaggtagtaagacttagccttggggttaatcccggtactgatgataacagcaatgatcaatccatagatacccaacactccagccataacaacagggacaatagatttcatcaccaactcaggtctcataactcccatagaagccacaccaacaccactctttgcggttccataagcagctcccatacctaataacatccaatgcaatccaaggattcaacatggtttcgtatgatcatataaagcacccaatgaggttccaaaattcgaggaatgcacaagagaatcgaatctctatctcagatttacagccaaataagacacaaaagcattgctcaatcagattttactagctcaaatgcaaatcatatcccataaatcaccaattccttatttttgcagatcgaacctaaaagactcattctttatatctatcacgatcatatacgcaatctgtaacaaatttcagaaaatgggaacacgatctcacgaagaaagaaacagatcaaaatgggaaaacagagagaaaatgaaattacaggagaaaacgagtgcggctgcagcgccgaggaagccgaagaagggagctgtttcatcgccgctgaacgtagacatgtcggagttttgtatctgagatcttaaatctgaaatcgagtcgatgaaaatctggcgagagagagagagatgaagatatatcgctgttgaatttatttatcttgtttgtagtttttgttttcagatgagtggaagggaacaacgctgcttgttctgtaacaaggacgaccacgtcattttggcttgggcctattttagattaaaagcccaatttctaagataccgatgtagtataagtaacataaacaatgga

SEQ ID NO: 27157 - DNA, 531 bp, Arabidopsis thaliana
cccagcgtatgcagcaggtgcaagactgagatgcaaatccaaccctaaaccatcatcaaaagtagttcctacttctcttgaaaacccattaaccgatggtctcggcccatgggcctgaacatgtctcatctgagccccaactactccaaaccctgaatcacgagccccatactcgtacgagaacccaccagcacccgcaccacccgaaccatcttggatgacgcagccatgagacacgtgaagttgagatggagaaacacgtggaagatacatccaaggacctcccataggctgaggcacggcggatgatgataaaagatgaggcggaggagcaaaagcagagactataggattccttaaaaactgagacgctgatccagcgtttgagaaatttgcggctgcgtttcgtgtagcttgaagctgagcacgtttaagctgttgacgctctttcttgtgagcgttttggtgaccactaaggcttgtgagttaccaaactctctacaacaatactgacactcatacttacgttct

SEQ ID NO: 27158 - DNA, 1535 bp, Arabidopsis thaliana
tatgatttcttatctattttttggtttcattttaagcaggaccaaaacctaaatggccggttcctccaaaactagttatattttttttttgtataattgcaaattcataaagatgaaaagagctgcattcttgggtatatacatgttaacatatctttctttagatacagtggtcctcctatgcatcacatgcaatatcgggtaaggtcaaaaagatattgaattgtccacaacacataagaagttaagatgtcactcgtggacattaacgtcgtagagtacccatatattcccatggaaattattggtattcgtaactcttggatatttttaaacgttgttaatactttaataaaatatattatattgtctaccgaatcaaacacagctgtatcaacaaaaataatttgaaacttgtataaatagatgaagtggatatgagaggaatgtaagccttatagaagagaaaaaaaatatgtattgtagagagtccttgtcgagtctccagactttgaacgtagcaaagagtctcagctctttgttccctaaacaatcagctctcatcaacccgatctccgctggacgtcgaaacaacctgcctcgtccaaacctcagaagacgatgtaaggtcaccgcttcacgggctaatattgaacaagaaggtaacacagtgaaagaacccattcagaatattaaagtaaagggatacataacggcccaagaagagtttctggagggcataacttggtcgagaggtctcgatgacattgctgatatccgcggcagatcattgctcgtcgagcttattagcgccaagactgaccagcgtgagtacaccttttttttcctttaacgattttttcaatgaaatttaaaataaatagatacaaacatttgtaataaaactagaggccttagaaaagtccaaaaaagcaattgttaccgatctatgtgcttatcaaagagtattaaagacatggaatttttttggtttgtaaaacattacaagttgcgttagtacataaatttatcaaacattagcttatgaaataaaagaagctagctagcacatcaagagtctgtatataaatttatgaaatgatataaaagtaggttaaggctatcaataatgttaaccaatttatacatatttcagggattacggtagaagactacgcacaacgtgtatgggccgaagcccctgatgagaagtacgagtgcgagtttgagatgcctgaagactttggaccagtgggagccatcaagattcagaaccaataccatcgacagttgttcctcaagggggtagagcttaaattacccggcgggtcgataacgtttacatgtgagtcatgggtggcccccaagtccgttgacccaaccaagcggatattctcaccgacaagtcctcttgccttcccaacaccagagcctctaaaaagtatcgaaagaggactcgagaccttcaaggcaagaccgcgagaagttggtaaattacaagtttgacgcattacgctatgatgtgtcacgatgtg

SEQ ID NO: 27159 - DNA, 2395 bp, Arabidopsis thaliana
caaaaccagtcatcggaaccaagaccctgatccagatcaggatccgagtcacgtaagtacgagtgtcaatactgttgtagagagtttgctaactctcaagctcttggtggcaccaaaacgctcacaagaaagagcgtcagcttcttaaacgtgcacagatgttagctactcgtggtttgccacgtcatcataattttcaccctcataccaatccgcttctctaccgccttcgcgccgctgcctcacctcctctctcagccgcatcctccgccgcatatgatgctctctccttcttcttcgagttctaagtggctttacggtgaacacatgtcgtcacaaaacgccgttgggtactttcatggtggaaggggactttacggaggtggcatggagtctatggccggagaagtaaagactcatggtggttctttgccggagatgaggaggttcgccggagatagtgatcggagtagcggaattaagttagagaatggtattgggctggacctccatttaagccttgggccatgaatgattataattttggcccagtaaagatctgtaaaatactactaggatttcatttttatagagtatgtttttttccttaatttcggttgaaattggtgaatatttttatctcttacttaccaaatctcatatttctatgtatgcgtttgctttcactttttttttttatataattcttcttgtaaaaaatgcaatgtgagttttcttccctatcattctgtcaagctttggttcaattatttagtaatcgaataatataggaatagtgttgaaagaagttgattagctagtttctgagatgcataccaagtcgatttcagttttcaataggaactggaagatatcattacatgttgttaaggaaaatataagcagtattaaaattacatgtaggacatatgctaaatgatcaaatatacttgaaaagagattatatatctcttggcagtgagcaaaagttgttttgcatcagcattattattgttttcaatcaaacagcaagcagtattataagccaatgcttgagaaacatatccagctgaaatcaatgccgccactaaactgacatctaaccactcaatcttggacttgctcagtttctgatacacatccacacaagcatctgctttctccaaactgtttgatgctttgtaagttcaaaagttaaaccaaatttgtatttagtggaatttttggtttagtcggtgaatttgtttactactgattgtctaataagcgaaggaggatgaataaaccaatatgcaaattctctctttaaccggtttggtcaacggtgaataaaataagaccgttaagaagggtaaaagcgtaaatacaacaaaatatttaggagcctctcttcttctctttgtgaccgttacgaatccaaaaaacaaaattgcaaactttgtgaggaagaagaagacgacacagtaatgaaggatacaatctcaaaccctagtttggaatctctgctttttcctgttaatccaatgtcagatacacaacaaaaactcaagcttttggttgataacggtgattacggattcgagagaggatctagatatggagaatacgcgagattacgagaatcaaaacttcgtatgaaacgagacttcgagaagattctaaaggaagaacaagtgagatttgggttcaccagagaagaagaaatcagggttttgccggagaagaagacgagattcggatttaaccctaatcagaggaaaacgtcgtcgtcttcttcttcttcgttggctcaatctgttcctgatttctcttctatgattcgtaaagagaatcgtcgaccaccagttaattcgaatttgcttcctcggagaacagaacttactccaccgtcgatgaagagtagaaacgccgccgttttcgctggatctgtgattagaggaagtgtttcagcgagtgctggtgagaagaaaggtattgggatgatgcgtaaaagctacgctgctgttgatgatcttaagaaaatatcaatggctgctgcttccgccataaacggcggtggaggaaaaaggagatcaattggcggcggaggaggaaggaaatcacttggcggcggtggtggtggtcggactattctaggttacagacaaatttattgattcttttgttcttgtttgtgtccaaactctaacatttgtgttcaaagtttgtttttttgtgtgtttaattggttttgattgataaagattagtccttttcagattttggttttgtgattgatagattttgtatacaagtaacgactaaaacttgcatagttgttatcagaaagctaataaacattatagttgaaatagcataagaaatggtgacattgattagttctaaagagattagt

SEQ ID NO: 27160 - DNA, 527 bp, Arabidopsis thaliana columbia
taccccatgatatcctgcactaatcatgagtgtgtttgtggagtcgcaagcaactccaataacttctccatcatgggcgtaccttcttttctctgacatatcgaagtaactaccccggctgattccagattggaggttgaatctctcaatccatccaccagctgttccgactactgcaaagtttccacaggcactgattgcacatgcctatcagacaagcaattttttaagagatcaacaaccactagagagaagaaaaagaccagtattgctaaaagaagatggttcctagatacaaagaccccctgaacatgctataaggaactgtaactaaactcattttttgtagaattggttattcaaggggggtcaataatccaaattccaagttctcacagtaatcaattcccacctataaggactaaagcacgtctacttttcttgttcagaagagtgtcagaagtagatataatttcaattttgaaccttaattggtgttggattctcagggcatggtttgaggatat

SEQ ID NO: 27161 - DNA, 485 bp, Arabidopsis thaliana
tacaattcaagcttcgatactgtaatgtctgtcaataatccactatgacactatgcagcttacgcgctaatattaacaatatctatggtactaaaattagctcattccaaaattggcttccaggggtaaacatctcacaggtaggagcctgacccggatataaatatcttgcaagcttccctgagatacttaagctaatgtgcttagtcctagtaagcctcactatacgtaacattcatttggcaaaatcccatcttctttcatttttctaaacagcgcatctgcttcacgccgtagtcctttcttgtagaatcctaacatcattgtagtgtatgtccaaatatcaggcatcaatccttggcagttgagactacaatatatatcccaagcatctgcaaccgtcacagccttacacatcccgcgaatgatgatattatacgtaacgatatcagcatccattccattcttctgcatatcgtgcaata

SEQ ID NO: 27162 - DNA, 536 bp, Arabidopsis thaliana
catactggtttcttgctttttcagtttagtatgcaaatagaacaaggtattccggttgtgtccaactggcttatcttcaaccgtttcaaatttgttgcatcaaaaggtgtcaggtttggaccggcttttcccttagcaaggtactgacagaaaatcttacatactctatgtaaacaactacacgtagaaaatgctttgtaaagatatcctagttttgcggtggttcttacctcttccgtgacagcttgacaggtggttcaattgtaggagacatgacaccttatcaagcatttgccattggtgggctaggcagtgttcggggatatggtgaggttgctgttggatctgggcggtcatgccttgttgctaatacggaattggcggtacctttggaacgtggagctgttgcatatataatttggtcttcagaagcatcaaatggtttccctgttaagttctcattgagctttggttccttttggtgtacagaacaagatgacagaagggccatcttcttggattgtggaacagaccta

SEQ ID NO: 27163 - DNA, 1285 bp, Arabidopsis thaliana
catttttggtaccaaggtctttctcatgtaagagactcttcatttctgttttatagcctaggcaaaccacacagccatttttgcagtaactttgtcaacgtttcttttctttcatactggtttcttgctttttcagtttagcatgcaaatagaacaaggtattccggttgtgtccaagtggcttatcttcaaccgtttcaaatttgttgcatcaaaaggtgtcaggtttggaccggcttttctcttagcaaggtactgacagaatcgtacacacttgatctagaaaactacacgtagaagatgctttgtaaagatgtcctagttttgccgtggttcttacctcttctgtgacagcttgacaggtggttcaattgtaggagacatggcaccttatcaagcatttgccattggtgggctaggcagtgttcgcggatatggtgagggtgctgttggatccggtcggtcatgccttgttgccaatacagaattggcgttacctttggtacgtggagctgttgcatgatttggtcatcagaaccattaaatggtttcccctgttaagctttcattgagctttggtgtctttttgtgtacagaacaagatgacagaagggaccatcttcttggattgtggaacagacctaggctcaagccgccttgtccccggtaagttcactttaccttctccgaacaagaatcataaagaagttgagacacaaaaatgataaagctgttgcggaattggtttcaggaaacccttcaatgagacaagggaagccagggtttgggtatggattcggatatgggctacggttcaagtctccattgggtcaccttcaggttgactatgccataaatgctttcaaccagaagactctttacttcggtgtcaccaatcttgcttcatcaacatagtcaaatagaataaagcaatcaagaaaagcacatattcaatgtcttgattcaaagatatatttgtgtttgcgttggaaccagaaacgccacaagatgaggcaaacacagtccaaggagaagctgtatatgacagagatcttgagaagataaatgtagtgttgtcattagaaatcatgtaatattacacgggtataagttttcattgttttggtatatacagctaccagagttttgtctgaaaagctgcaggtttcatagagaagagaacacacatttgatttgatggtgttgcactgttgcgaattagtatctattgcttttacatttgtacgtatatctatggctcgactctcgactaactctgaataca

SEQ ID NO: 27164 - DNA, 588 bp, Arabidopsis thaliana
ttataatattttgtttttctttggttgcagtcaagttcttgttgtgcaaatatgtaatcatttgtgttcaccttgcttctagcagaagctatacgaatcatttgaggaagatcctgggtatttccagtttgcaactgctgtaacatctaacgatatcgatgaaatacaaaagtttcttgacgcttctgttgatgttgggtatatctcttgacacttctctgtatctctaaaaagtgcagtaaactttggtgtaaattgttgcatatcactttctctttagtagcatattagttagagattttggtagatatttactgctttcaggtattttttattttagagagttatctttatatgttcaagggtatgataatttagcaatttgatcatactcgtactgattgttgcctagcatcttctctttagcaccatctttcaccttcatctgagttcacataaatttagagattctggtagatatttactcatttcgggtattctattttagatagttaccaattatctgttacatgtttaaggatatgataaattaacaatttgaccatgccatgtagtgatatatgatat

SEQ ID NO: 27165 - DNA, 506 bp, Arabidopsis thaliana
taagtttttggatgggtttatatttaaaaacaaaaacagaaggatattgttggacaagaacaggggagagacaagcggcaagaatgagagagaagtacttaagagcagtgttaagacaagatgtgggttactttgatcttcatgtcacaagcacttctgatgttatcactagtatctctagtgacagcctcgtcattcaagactttctcagtgaaaaggtctaaaactttgcatctttatacatcattttgtttttgaaaacctgtttttgatgatttttttatttcaagcagttaccaaattttctgatgaatgcatctgcgtttgtcgcaagctatatagtgagtttcatcttgatgtggagactgacaatcgtaggcttcccattcatcatcctcctcttggtccctggactaatgtatggacgagccctcgtcagcatctcaagaaagatcacgagcagtacaatgaggctggttctatcgccgaacagcgcatctcatcgg

SEQ ID NO: 27166 - DNA, 1015 bp, Arabidopsis thaliana
cctcagtttcaagcgaaagacaacaaaggcttctctgatatcccgtccaaagaaaacttttttaccctcgaatcctccactgcttctggtagtcttccttcgtatgactctccttctgtgagcattacatctggccggagcccgttttctcctcagggctctcagtcttgcatctcggatctccatcattcccctgacaacgtctatggatcacctttgagtggggtgtcatctcttgcctatgatgaagctggagtcaagagtaagattcgggaacttgaggtctcgctgctgagtggtgatacaaaagttgaagaattctcaggttttagccccgctgctgggaagtcgtggaactgggatgaacttttggctttgactccacagttggacttgaaagaggtgctggtggaggctgctcgggcagtcgctgatggggatttcgctacagcgtatggattccttgatgtcttggaacagatggtgtcagtctcaggcagtccgatccaacggctaggcacttacatggcagaagggcttagagcgaggcttgaggggtctgggagcaatatatacaaatccttgaaatgcaatgaaccaacgggaagggaactgatgtcttacatgagtgttctctatgaaatctgcccctactggaaattcgcgtacacaactgcgaatgttgagatcttggaagcaatagctggggaaaccagagtccacattatcgattttcagattgcacagggatcacaatacatgtttttgattcaggagcttgcgaaacgccctggtgggccgccgttgctgcgtgtgacgggtgtggatgattcacagtccacctatgctcgtgggggaggactcagcttggtaggtgagaggcttgcaactttggcgcagtcatgtggtgtcccgtttgagtttcacgatgccatcatgtctgggtgcaaggtgcagcgggaacatctctgggttggaacctggctttgctgttgttgtgaacttcccatatgta

SEQ ID NO: 27167 - DNA, 519 bp, Arabidopsis thaliana
gatattgctggacaagaacaggggagagacaagcggcaaaaatgagagagaagtacttaaaagcagtgttaagacaagatgtgggttactttgatcttcatgttacaagcacttctgatgttattaccagtgtctctagtgacagcctcgttattcaagatttcctcagtgaaaaggtctcatcttttctatattacgtacatagatcttgtttcttgttcttaaacaagttttttttgatgattttgattcaagcagttaccaaactttttgatgaatacatctgcgtttgtcgcaagctacatagtgggtttcttattgctgtggagactcacaatcgtaggctttccatttatcatcctcctcttgatccctggactaatgtacggacgtgccctaatccgcatctcaatgaaaatacgcgaggagtataatgaggctggttctatagctgaacaggtcatctcatcagttcgaactgtctacgcatttggtagtgagaagaagatgatcgaaaag

SEQ ID NO: 27168 - DNA, 995 bp, Arabidopsis thaliana
tccaagaattgcagataacaatgatgaaatgatagagttgggggccgcagtgaaagcagcaatgacagttctaaacaaacatggaagcagtagttcagtgattgctgctgccacaggtgctgcgttggctgcctctacttctataaggcagcagatgaatcaaccagttaagcttgatgaatttggcagagacgaaaatctgcagaagcgcagggaagtggaacagagggctgcagccggacagaaaaggcgagctcgatttgaaaataagcgtgcatcagctatggaggttgatggaccttctctgaaaatagaaggagaatcaagcactgatgagagtgacactgagacttcagcttataaggagacaagagatagcttacttcagtgtgctgataaggtctttagtgatgcatctgaggagtaccccagctttcaaaggtgaaggcgagatttgagaggtggaagcgagactattcatcaacttatcgtgatgcttacatgtctttgaccgttccttccatcttttcaccttatgtaagactggagcttttgaaatgggatcctcttcatcaagatgtggatttctttgacatgaaatggtgagttactcgcagtttctaactttcctaattatacaaacatacattgtcaaacacagttcacatatactatctagtaggcattagtctcttaagagggttagctaaaaaatttgtttagatttttttgcatttttggaagtgatctaacttgtaattcgtggctccaggcatgggttgctttttgattacgggaagccagaagatggggatgattttgcaccagatgatactgatgccaaccttgtccctgagctagtagaaaaggttgcaattccaattttgcaccatcagatagttcgttgctgggatatacttagcacccgggagacaagaaatgctgttgctgctacaagcttggtgacaaattatgtttctgcttcgagtgaggct

SEQ ID NO: 27169 - DNA, 1255 bp, Arabidopsis thaliana
actaattggactggacactgcagcatgaagatagggcatttgttgtgaaattttcggctatagagatctacaatgaggccatccgcgatcttctcagcccagatagtacaccactgaggctacgagatgaccctgaggtgaaagatttttttttctctccttactgcgagttctttttgttaataatgttgtgtgactctcttctcgtgtttttcttcttcttccatttagaaaggggccgccgttgaaaaagccacagaggaaacgctgagagattggaaccatttgaaggaacttatctcagtttgtgaaggtaataatctcaaatagtcaacctattttctgttactacaacgagctgatagttatggagcttgctcaggatttgcaactcaggttattctgtataaaatgttgtcttagaaatatctctcatcatgtttctttacttcttgattttcttattgcagcacagcggaagattggtgaaacttcactaaatgagagaagttcaagatctcatcaaattatcaaactagtaaagctcttttctatcactggatctaaggcacaaagattttcctttctttttttgctcagtgccttatctaaattgttaacattgtgtagacagttgaaagctctgctcgtgagttcttaggcaaggaaaactcaaccactctcatggcgagtgtggtatgtactcatctgctttatcttcttttgggtgttaaggttataagctttgccaatcatcttgtttgtactcattgtttcttatgtacagaattttattgatttggcggggagcgagcgtgcatcgcaggccttatcagctggtgcaagacttaaggagggttgtcatatcaatcgaagcttgctgactctaggaacagtgatacgcaaactcaggtgtggaagtgatactttggctgacactaaaaccatactatttttagcattttgacaaaacaaaattgggactttacaagcatctatatttgtctttctgaaacttaatgtgcattaatataaagactgtcaacatgatgtagcaacggaagacaaggacacatcaactatagagactccaaactcacacgcattcttcagccgtgcttggggggcaatccagaaccgccatagtctgcacgctgagtccagcgaggagtcatgtggagcagactagaaacactctctgtgtttgcttgctgtgccaaggaagtcacacgaaagcacagatcaatgttgttat

SEQ ID NO: 27170 - DNA, 588 bp, Arabidopsis thaliana
ctcatggagcgtggaacacacgcgatgctgtggtgaggaatgggcgcgtgggtggtggtttgtcgctggcgtttgaggacgcgtcatcttcgccgaggatcgtgcaccagatacgtggcggaggagaaggaggaggaggtggtggaggaggaggaagagttgagaggcagttggcgtcgtcggctccggtgaacgtgccggattggagtaagatataccgagtcaactcggttgagtcgatacacgagtctgatgaagaggaggaggaagattccgggatgatgatgccgccgcatgagtacttggcgaagaccaacagcgacggagcagaaaatctggcggcggtggctcggtgtttgaaggagttggaagaactcttaaaggacgagaattaaggcgcgttcgagacgcgatttggagccaaacagggttctacggctaagttagtaatataaaatttgaaagaaaaaaaaaacaatataaaacttcaacataaaaactttggaaaatattttgcttattttgtcagtttagagttaattttgcaactttcttgaatcccaagcttgagatgtataagatttatat

SEQ ID NO: 27171 - DNA, 618 bp, Arabidopsis thaliana
tacacaggaacctgagagggattatctcgaggctgctataaggactgttgttcagatacacatgtgcgagccacctggagatattcttgttttcttaactggagaggaggaaatagaagatgcttgccgtaaaatcaataaagaggtcagcaatcttggagatcaagtgggtcctgtcaaagttgtgcctttgtattctactcttccacctgcgatgcagcagaagattttcgaccctgctccagtgccgttaacagaaggtggtcctgctggacgaaagattgttgtctcaaccaacattgctgaaacctctctaaccattgatgggattgtttatgttattgaccctggttttgctaagcagaaagtctacaacccacggattcgagttgagtcattgttggtgtccccaatatcaaaggcaagtgctcaccagagatcaggtcgtgctggtagaactcgccctggaaaatgttttaggctctacacagagaagagtttcaacaatgacctgcagccacagacatatcctgagatattgagatcaaaccttgcaaatacagtcctgacattgaaaaaactttggcattgatgacttggttgcactttgatttcagg

SEQ ID NO: 27172 - DNA, 1168 bp, Arabidopsis thaliana
gatcagactggttagattcttatctatcagtttatttatgatacaaattctctctcacttagcttggcccttgattgtctcgttacttattagacagttgaaagctctgctcgtgagttcttaggcaaagaaaactccaccaccctcatggcgagtgtggtatgctctcatctgcaaagctaaaacaacccttctttatgttatatcttgagagtttttttttttttttaaaaaaaaaaaacaaaaacaatatgtcttcatgttgatcaccctttatgtgcagaatttcatcgatctagcaggaagcgagcgtgcttcacaagctatgtcagctggtacaagactcaaggaaggctgccatatcaatagaagtttgctgactcttggaacagtgatccgtaaacttaggtgtgtaaacaatacatcctttaaagattgctgtctttggcatgcttagtagttcaactttaataatagaaccacgcctttctacacttgacctagtaagggaagacaagggcacatcaactttagagactcgaagctcacacgaattctacagccatgcttggggggtaatgcaagaacagctatcatctgcactctgagcccagcaaggagtcatgtagagctaacgaagaacactctcttgtttgcgtgttgtgcaaaggaagtcaccacaaaggcgcggatcaatgttgttatgtcagacaaggctctgctaaagcaactacagcgtgagcttgcgaggctcgagactgagctgagaaaccctgcctcctcacctgcctcaaactgtgattgtgcaatgacggtgaggaagaaagatcttcagatacaaaaggtttgtgctttgtgaacacgcccaaattgcttccatatgacattggctggttttgtaactgtgtggcgggttaatgctgatgaagagttaatgttatacagatggaaaaggagatcgcagagttgagaaaacagaggcatcttgctcaatcccggcttgaagatctcatgagaatgattgaacacaatgtggcgtcaaaggtattgctggttcttcccacaatctcactttgtgcagcagataattgaattgtacatcacgttttcccaattatcacggttctgccttagatttctatggcaattttactaaaaggtttgcttc

SEQ ID NO: 27173 - DNA, 869 bp, Arabidopsis thaliana
  unsure (1)..(869): unsure at all n locations
tgagcggctctctaccaaatgcacaatgaaacatcaaaacgatgcaagacatcaaagttgtgtcaactattcactaagttctgagaagaaaaacaaaaagaataaaccaaaaaccaaacacatttctctgcaactaagctttttcttcagtccctcttgcagctgcaaatcatcaatcaaaaatccagtatgagcaaaattatattttgcacatgaaaacatatttttgttcggttatcaagaaaaggtttaaacctttacgccattccgcgcttacgtttcgctttttcccattgatcaagtaaacaagtgacaccttcttcaagtgtagccctcttatcttctttgaagttccatagctctgttgtaatgtaccttccactcgggttatactcgtttatctccaacaaagctttcgtgaccgcattgtaaggaccatctcccaaatctgcctttagctccctcagcttttcgtctctatcatctatcacttcctaaacacaaataacaacaacaacacaaaaacagctttttaatctttcagagagattcgacataacaaaccgtgtcaagaaggcggtcttaccacttctctatcttgattttcgagcttgacccgcttgtatggatgccaatctggatcgttgatatagtgtcccaaagttggagaacttcaactgctcggtcctccacatcttcctgacaatacttctgctgcattgcatccacgaatggtttccttacgagctctcccatacacttaacaccgatacttgttttctattctctcataatctacataaggcacatgaaacaaacaaaccanaatgtcaagctttctcagaggttttctgatataattgaaaaga

SEQ ID NO: 27174 - DNA, 912 bp, Arabidopsis thaliana
cttggctagtgtgatttggctttgcggtcctctctctggtttgttcgtgcaaccgctcgttgggcatagtagcgataggtgtactagtaagtacggtcgtcggagacgtttattgtcgccggagctgtggcagtttctatctctgttatggttattggtcatgcggcggatattggatgggcatttggggatagagaagggaagattaagccgagggcgattgttgcttttgttttagggttttggattcttgatgttgctaataatatgactcaaggtccttgtagagctctccttgctgatcttactggtaaagttcctgactttagtgttgattgggtcttcaatttgaaatcattcaaatgtagtaaatttgggattctcgtgattatacactcacatgcaaaacatgaaaatgcataaatttgtgattttggatacaatttggggttatataattacctaattggttcctaacaatcaaaaggtcccttctttgtttctggtcggtggcttatcgttgagtcacagagactttgttttttctctttcccttgaatcaaattgtggattttggtgaagttaatcgtagcctacgattgtgtgataacctcatggagtgaaaacaaagatatgttgtgttttaattcttgtcctattgctttattttcagagaatgataatcgcagaacccgagttgcaaatggctacttctctctctttatggctgttggcaatgttcttggctatgctactggatcatacaatggttggtacaagatcttcacttttacgaagacagttgcatgtaatgtggaatgtgccaatctcaagtctgccttctacatagatgttgtctttattgcaataactacgatcctaagcgtctcagcggctcatgaggtgcacttg

SEQ ID NO: 27175 - DNA, 656 bp, Arabidopsis thaliana
attcaagctcagaacagttgcaggaggtggaaaaggagagctgtaaagaacagtgaccgtggtggaatcgccattaggcgcagaacccgtggtctggcttgtgggtgctggttcctggttcaaagatcctttgagaaaatcttggaagattgagttagggttttggttgtggtggttttggcccctgaaccttggctcgtggttgtgttgtggatgagggctgtgtcggtttaggtggtggatggaagcaaggttgatgtcattccaaacttcttccatggtgacaagagatctcttctgggcttgagagtcttgagaaggtaaaggagatgatgatgaggttgatgatgatgaagaagaagacgatggtgatgaggatgaaatggaagaaactttggtgagagtctggttcttgtttgtagcagagagtctatggtttctctgatgcttagctgatgacaacattggaaaagagaacagaagtgaaccaacaacacagctttagtctttggttgtcaattgtctagtagtacctacacgcagagagggagtagagagagaaagtggtgagagccagagagaggtcttgactttagcaggcatttctggaatgatggggttgggtccagactccagaagaagagacagagggattg

SEQ ID NO: 27176 - DNA, 1592 bp, Arabidopsis thaliana
gagtccctggtggctggtgattaaggctaaaggtccacctggccacggtgccaagctctatgacaactctgccatggagaatctgctcaaaagcattgagagtattcgcagattcagagcttctcagttcgatcttctcaaagctggtgggatagctgaaggcgatgttgtctctgtgaacatggccttcctcaaggctggcacaccttctccaactgtaactacttttttcttcattcatattatgtatgattccaaagttgatgtctttatctgagaatctggctctttctttatcctcaagggtttcgtaatgaatctgcaaccatctgaggcagaagctggtttcgacattcgtgttccacccagcgttgatgctgaagcactcgaaagacgtttagtggaggaatgggctccagcagcacgaaacatgtcctttgaggtaatttcttggccacctgtatctctttctcaatgaatttgaagaaactgtccagtcttgaagccaagtagcaacacaaagtcccctttttttatgaacaaagtctactcgacaactttaactaattaagatgttagctggggcagttcaagcagaagcttacggggaagcaattccttacagcagcagatgattcaaatccttggtgggggctcttggaaaatgctgttaaggaagccggaggtaggaccagtaagcctgagattttccctgcatcaacggatgctcgctactttcgcaaggctggcgtgcctgcctttgggttctctcccatatcaaacaccccgagtctgcttcatgaccacaatgaggtacatacatgttgatactcactttgctcattgttggaggatcatcattcatgttgtttatctgtgttgcagtatttgggtaaagctgagtacttgaaaggcattgaggtgtatgtttcaatcatcaaagcttatgcatcatatgaaagcaaaagtggttcacgagatgagttatgagggtctcaacacagcccattcaagtcttcctttcgcaaatttgtacaatcaataagatctgaatccatcctgtgtttgttgtggtaaatcagagacatcttgttcttgttgtgagacagttggcattggcaaattgtattattcattcctgctttttcaatgcttcttcttttttctccttgtgtttcctcgtcgttgatgggccgtacaaattaggcccattagcatgatccagtacgaaatccatttaatgtaaacccaaccagtcctcctatctcttcgttcgtgactctctctgctctgctcccaaatgttatcgtcctccggaagctccctcttatggcggagccgtacacatgtgcctgcaccgccgcctcggtcttcgccaccgcttaaagctctctcctttcccttctcttccagtttatggtttattcacagaaccacaatttctcctctttcgtgttcagctgaaagttcctcggagattgccctggcgcagagccagcctgcccctgatttcaatcgtaagtcctccattgctgcctttaagattatataaatgatgctttccggtgaattaaggcatctatttttttttt

SEQ ID NO: 27177 - DNA, 520 bp, Arabidopsis thaliana
tgcctggctcaggtcctagaccacctcctccttttggtcagtcaccacagcctttccctcagcaatccccttcttatggagctccgcaacgtgggccttcacccatgtcccggcctggacctccagctggcatggcgagaccaggtggtccgcctcctgtatcacaaccagctgggtttcagtcaaatgtacccttgaacagacccactggtccaccttctcgtcagccatcatttgggtctagaccttcaatgcctggaggaccagtggcgcagcctgccgcctcttctagtggttttccagcttttggtccatcaggtagtgtagctgcaggtcctcctccaggatctcgcccaatggcatttggttcacctccacctgtcggatctggcatgtctatgcctccctcaggcatgattggtggtccagtcagtaatgggcatcaaatggttggttcagggggatttcgaggggacccagttcccggtgctgctgttaaactcacaggcacctatgtgcg

SEQ ID NO: 27178 - DNA, 1054 bp, Arabidopsis thaliana
ttttatctcaatccatgaccaaactttaaaatctcccaatgtgattaggcaccaaaaggttaattagcgtacaacatgttttatttcttcttgttgtacttcagcatagagcttcctttgtgtttttttttcaagtcatgtcataatctccagatctaaagatgattgttaaaaagttgtcattttcttgatggaaatacattcaccaatgtaagatctttgacgatgagatatttatgtgtttatgttgcttctttgcaaacagctaatagctgaagcatgggatgcgggtgggctgtaccaagttggcatgtttccacactggggtatttggtctgagtggaatggaaaggtcagttaatgtattacgaggataaaatgcttctttcaattgtttgagacatgagatatggaagagtaagtgtcacagtgtataagggtttcatgccaaatgtgatgtaattattagtggttattcatctttctgctgacccttagaatatgctctaatcaattgaaaatgggacagcctatgtgatctgcctgtactagctaactgaagtgtatagtaacctactagcctgtattagcaatgaacatggaagtcttaaacttactatccaatagacaacacatgagacaacaataatgaatattcagttctcgtggtagttcccattagtgtgtgcactgtgctggatatctatcttcgttgtgaatttgatatggtatagtaacatttttgtccatttcagtttcgggatgttgtgagacagttcataaaaggcaccgatggcttttctggtgcttttgctgaatgtctctgtggaagcccaaatctgtaccaggtaaatttaactcctattatactggggtatctggatatataactaatctttatggtgttctcttggttgttttgtctgtgaagcttcatattttggttgtatatcttatcgatatctgattgtgtctgtgcatcagggaggtaggaaacattggcacagcatcaattttatatgtgcgcatgatggtttacgttggcagatttagt

SEQ ID NO: 27179 - DNA, 640 bp, Arabidopsis thaliana
  unsure (1)..(640): unsure at all n locations
aatgtgagaaaagctgttgcaagagtgtgtaaatctttctgtggacttaattaagtatggttgtttataccattgctattagtatgtcaatctttatcgctgttattaatcaagagtaaacgatttataaacacaatgaaagcgttgaaaataaagagaatattttctgttatcatttgaaagtttacacacaaggcaaagttccgcaaaaacatacaacacattattttcaaaatgttgttcttaaagctttatcacttcctataacctgcttcttggtactggtcccatctctttggccttggtcctcagaatatgcttctgaatttttccagttgctgtctttggtaacggcccaaacaccactgactttgggacccaatatgccggaagcttctcccggcagaatttcattatatcctgagccaacttattctggtcatgcttctcgtaatcgctcttaagtgtcacaaacgcacacggagattcttgccaccgctcgtctggcctggcacaacagaggcttcaagaaccgcggggtgatggtacactacgtnttcgacttcgacactgctgatattctcgccccagagattataacgtcctttgacctggtcttgatctcgatatcagtgtctgg

SEQ ID NO: 27180 - DNA, 616 bp, Arabidopsis thaliana
tgaattttgtgtttgattttatagttcaacgacatgctcaaacaagtgctacaaacacatttaggaactttcagacttgtttttagatttttactaaggaacatacaggttcgttcgggcaatcaaatccatgaaaaacatatctgatattgacatagagattcttcaccttcaacaaatagagaccaaaacacaacggcaatgatgagtgagaaaaaggccacgcaccttaaataaggttcagatgaactactatcattagctagctgagatggtgtttcataatcacgagaaatgaaaccaatccatccaagcaactttctgaagagctttgcgcgaggaccaacaggtgtcagaagcccctcatatcgactgaccgccctttgtgctgctaactgcatggggaggacagaatctggaaggaagccatctttcaagaaattatcagaagtttggtcaagatatgattccttaaaaagggataggtccttgagccaaactttcattccctctgataaatcttgaatttcttgagtttgagaagcctcacttaacgcctgtttatcaaatttgaagaaaaaatgttattcagatgaacgagatagatttgattatc

SEQ ID NO: 27181 - DNA, 883 bp, Arabidopsis thaliana
tgtgtttcggcctgtaaatttatagtgttttacaatggacgagcaaagatcaaaagctgtcactgaggcctttgtacggttatacaaagaagggcttatatataggtatgtttaagtctgactttgttctttgatgcaagctatagaattcctgtagatggaaacagtaatataccgaaattaggattataggaccattttacctttttcagttatcttgttgtaagaaagaacatttgactgaaggtataccatggcttctgcagggatattcggcttgttaattgggattgtattttgagaacagccatatctgatgttgaggtaagtcagcagcaactgttagactaagattgttggagggcatcctgtttatgtggagtgtctaatatctgtaggttgagtatatcgacattaaagaaaaaacgctactaaaagttcctggctatgagaagccagtagaatttggtcttcttacctcgtttgcttaccctctggagggaggcttgggagaggtaattgttgccactaccagggtggaaacgatgcttggggatactgctattgctattcatcctgatgatgcaagatacaagcatcttcatgggaaatttgctgtgcacccatttaatgggcggaagttacctattatctgtgatggaatacttgttgatccaaattttggtactggttgtgttaaggtatacctctaccttatatatttgatgctgggtttctgcccctattagttgtgtttcttgtgtcaaagttacttaattcttattttgtagattactcctgcccatgatcccaatgactgtgaggttggaaagcgccacaagctggaatttataaatatattcacagatgatggaaaaatcaa

SEQ ID NO: 27182 - DNA, 989 bp, Arabidopsis thaliana
tccagcgcaaatactgtccacataatcgatttcatagtcaaacatatctctaagaggtttgatgctgccggaatcagacctccaggagttcacagctttcttctccgatctcccaagcaacgacttcaacacgcttttccagcttcttccaccacttgtctctaacacttgcatggaggagtgtcttgctgccgacgggaaccgctcctacttcgttgctggtgttcccggatcgttttaccggcgactttttccagcgagaaccattgactttttccactctgccttctccttgcattggctctctcaggtacacactctctacgtaacgttgtaaagtatgcttggtcactttattacacgtgtcaagtgtcatggtgcttggtttttctgcttcagagcaacatttatttttatactttgtgaactcgtaatttttttttaagctttaaattttttaaatttcatttttaaaccaaaataaagaacttgtaattttttttttcaaactagtattaaccaaaatatcaaaaaaccaaaaacacgtgataatatatatattaagaagtggaaaatgtggtaggtgccggaaagtgtgacggataggagatcggcggcgtacaatagagggagagttttcatacacggtgccggagagaagacaacaacggcatacaaacggcagtttcaggccgacttagcggagtttttgagggcaagagcggcggaggttaagagaggtggggccatgttcctggtctgtcttggtcgtacctctgtggatcccaccgaccagggtggtgccggtctactcttcggcactcattttcaggacgcttgggacgaccttgtccgcgaggtacaaccttaattaattttactcgttattcgtcccctaagtaattaattaatcttataactctaaatcattaaccttgagctctaaatttatactactattaacccttgcccttttcgcttttatgaat

SEQ ID NO: 27183 - DNA, 546 bp, Arabidopsis thaliana
tgggtggtcttctatgactaactatgaacaccatcgtttgggacgaatttgggttatttggaagagttcggttcgtgtcactccggtttataaaagtggacaaatgattacttgctctgttttgactgaagagaatgcagaggaatttttggtttcttttatctatgcttcaaactatgtggatgagaggcgggaactttgggaagacttgagaaatcattacaatatgccaatgttccgtaccaaaagttggatgattcttggtgattttaatgaaattctggagggggaggagcattcaaattttgttacttcaccttttattccgcagggtatgcgagatttccaagaagtcgttagagactgctctctagctgatatgagctatcatggtccggtgtttacttggtcaaacaagagagaagaggggataataaataaaaagttggacagagttcttgttaatgaagaatggaatcgtaaatttcctgcggcttatggcacttttgaagcaggagggtgctcggatcatttgcggtgtagagt

SEQ ID NO: 27184 - DNA, 579 bp, Arabidopsis thaliana
tgttgtaacaggaaatgcaaacgcagttacaagctcaaaagatgaatcaaagatatggcacagcagattatgccatatgagtcagagaaatattgatgtgttgatcaagaaaggatgccttcaagctgaaaagataaatggtctcgagttttgtgaagactgtgtgtacgggaaaacacatagagttggttttgggtctgcaaaacatgtcacaagagagaaacttgagtacattcactcggatctttggggagcgccatcagtaccaaactcactaggtaattgtcagtactttatcacgtttattgatgaccttacaagaaaagtatggatttattttctgaagaagaaagaacatttcttctcttgtatgttgatgatatgttgatcatatcaaagaacaaggaaacagtcaaggaattaaaggaaagactgagttcagagtttgaaatgaaggatttggggcctgcaaggaaaattctgggaatggagataacaagaaaccgagaagaaaatattttggagttactcagagaagttactgcaacaggtgttaaagcattcagaatggatgaatgc

SEQ ID NO: 27185 - DNA, 734 bp, Arabidopsis thaliana
tttgttatatgataccaaaaatagaaaaatttggtagatgacaataataacttcattgccactctcaagttcgttcgttcgttgaatcttatctcacttctcccattatttacaactgtggataagccttttagtctgactcagctttctcaagatccgaaaacacactgacccaacccggttcgattttgcttaaccggacaagatacattaatctgcctaatcttcaattatttaaaagctaactaaacgttatacgtactaatcacttcttcccctataaataaacctttctaatttctcatctcaaatcacactgcatcacaaaacccaaatcggaacttaaaccaaaagacaaacaaaaacgccgtcgtttcacgatgctttcttcttccccaaccttcttcgctactccatttctctcttcttcttcttcttcttctccgtcgttctcttctacttcaccaccgtcacgcatttcccggatctcgccgtcgctttctacaaccaccgcgtcctacacctgcgccgaagatctaccgagattacgccaaatcccgcagcgattttcagcaaccgcgtctctctacgagatccttgaaattcccgtcggctcgacgagtcaagagatcaaatcagcttaccggcgactagcaggatctgtcatccgatgtagcgagaaatagtcgggataactcgtcggcggacgatttcatgaagatcacgcagcgtat

SEQ ID NO: 27186 - DNA, 722 bp, Arabidopsis thaliana
ctaggttatacattttcgtgaaattaggtcgatttttggatacattattggtttatgtgttaattcaaggcagttgaatcacttgatgtttcaggtactgttgtttatctctatggatgccaaaaagttggatactggcccgagagatgcaatcaactggctccctgacgagattctgggcaaaatcttgtcattacttgcgacaaaacaggctgtttcaacatcggttctttctaaaaagtggaggactctctttaaattagtggataccctcgagtttgacgattctgtctctggaatgggtgaacaagaagcgagctatgtgtttccggagagctttaaggatttggtggatcgaacagtagctttgcagtgtgattacccgatcaggaagttgtcactaaaatgtcatgttggcagggacgatgaacaacgaaaggcttgtgtgggccgctggatatcgaatgtcgtagggcgcggtgtttcagaagtggtactaaggatcaatgatcgtggtttacactttctgtctcctcagctcttgacatgcaaaacactggttaagctgacactaggcacacgtctctttcttggaaagcttccttcatatgtgtcacttccatctcttaagtttctcttcatccatagcgtcttctttgatgattttggagagttgtctaatgtgcttcttgctggttgcccggtggtcgaggcgttatatc

SEQ ID NO: 27187 - DNA, 638 bp, Arabidopsis thaliana
catctctccttgctaaaaagtggaggactatctttagattggtggatcatctcgagttagatgactctttctcgctgcaagccgtaaaggaccaaacaccaggtctccgtaaacatgtgaggtttgtgtttacggaggacttcaagatttttgtggatcgaactctggctttgcaatgtgattatccgatcaagaatttctctctaaaatgccacgttagcaagtacgatgagcgtcagaaagcttgtgttggccgctggatatctaatgtcgtagggcgcggtgtttttgaactggacctaaggatgaaagatccaggtatacactttctgcctcctcatctcgtcgcaagcaaaacactggttaagctgacgctaggcacacagctctgtcttggacagcttccttcatatgtgtcacttccatctcttaagtctctcttcattgatacgatagttttctacgacattgaagatttgtgttgtgtgctacttgctggttgcccgtgcttgaggagttatcagttcatcaccatgactttatagcaacgcctcacaccatatcgagtccaacccttaagagactatcagttgattaccattgtcctgatgatgttgatagtgctagtcatatgtcat

SEQ ID NO: 27188 - DNA, 937 bp, Arabidopsis thaliana
gttactgtaaaaatttatgtgagaatctgaataatttgttggtttgttggcagcttgaagatctttgcaccagtgatggtattagcgcttgttgttcttgttccagtaaatgtatcaagtggaacacttttcttcttgaagaaggaacttgtggtcagcaatatcgataagctctctatatccaatgttcagcccaaatcttcaaagtgagcttacttgtgaactaaaattatgctttactaatcaatgagttttactggctaaagtttaacatttctgtgtatgtgtgtgtgtgtgtttaggttcttctttcatattgcagtagagtacattttcacgttctgggcatgtttcatgctctacagagaatacaataatgtcgctattatgcgtctgcagtatttagcttcacagcgtaggcgtccagaacagttcactgtgagtgaaaaagccgcaaacttcaaacatggataattgttgcatctatgtttatatatactactgtttgtttttgcaggttgttgttagaaacgtccctgacatgcctggtcactcggttcccgataccgttgatcagttctttaagacgaatcaccctgagcattacctctgtcatcaagtaattttgtttgtccttcatcacttactttagttgtagaatgcgttagtgtgtgattgatgaattcaacattcttgtttcaggctgtttataatgcgaacacttacgcaaagctggtgaagcaaagagcgaagttgcaacgttggtttgactattatgtgctgaagcatcaacgtaatccgcataagcagcctacttgcagagttagtctctcccacgccatttgtttagctttttgaaatgaaacgatgttgattgtgatgggcggattttcttttttcagacaggttttcttggtctatggggtaagagggttga

SEQ ID NO: 27189 - DNA, 874 bp, Arabidopsis thaliana
gatcccatcctgcacaacaaaacaaaacggaaggggaactactgagatttgtaggtccccagccttgattcaccaagaactcttcggctacttcttttccacactaacggaataacatcattcataaccagataactatctctccgtcagcagttttcaaggacattgatcgccatgctctctgtgcgaaaatgatagggaatcgattagtcatgtcttgtttcattgttggccggctcgagaagtttgggagagggttaacatccctttgcccactcatggtttcacaccgtctattactgataacttagactttgtctttaacttaatgagtaacgatggtttatctctttctctgagaatggccaatccatggttactttggggaatttggaaacatcggaacacaacggtattggcgggaacacaaggcgacttaaatgcacttatagctcatgcttttgaagaatctaaggtgtggaacaagttaaggacgatgccaacccagtctgtaactcgtctttcgctgaatcctagatgtgcagttagatggactaagccaccactagatacgcttaaatgtaatatacatgtttcttggcttaatgatgttcacatctgtggcggagcttggattgtcaggaatcatcatggggacgctgcttttcatgcccgagaaatgtttttaccagcgtcaaatcgtattgctgcggagttgagaggggttttatgggtcttacacagtttacgtgacctacacttagataacattgagatatgatcggactgtctatggaagccattagtgatcccataaattggccaacgtatttatcttatcttgatagaattcatcggattcttccgaattttg

SEQ ID NO: 27190 - DNA, 595 bp, Arabidopsis thaliana
gatccaatgtggacaaaccattgtttgcttacaagtggctcaataacctaacaccagttaaaccatgcatgagaaaattatgaacttcaaacgaactgaaaaattaatgctgggtcagtagaaagatacttctccaccacgctgagatcttggaactcgtaaagtgtgaggctccttcttaacagctaaacctatctcctcaagatctgcccatagtttctccctcacctcaaacctgtcaaggccactgaaaatacgatgtatgttaaggcgccatggacgttaagatgtaaccaaagggtattccattcagctaaaatataagttttaaacaaaatgttaccaaaacaagccagcgacgtcattaagtgttgcatccttgttcatcacattcagaatggggagacctagctttcttgcaagaaggtaatcgttgtgatcatgcccaggacttatcttcagaacaccagtcccaaaatccttatcaacatactgccatggtacacaaaaaaactgatgagaaatgcctgaagagcagcagaggaaatactatgaggtactcagtttcttggttctgagtaactagacttagaag

SEQ ID NO: 27191 - DNA, 739 bp, Arabidopsis thaliana
cgagctcacgctcggtattggtaacaagtgggctacgatctctcgtcttctcaatggacgaaccgataacgctatcaagaatcattggaactcgacgctgaagcgaaaatgcagcgtcgaagggcaaagttgtgattttggtggtaatggagggtatgatggtaatttaggagaagagcaaccgttgaaacgtacggcgagtggtggtggtggtgtctcgactggcttgtatatgagtcccggaagtccatcgggatctgacgtcagcgagcaatctagtggtggtgcacacgtgtttaaaccaacggttagatctgaggttacagcgtcatcgtctggtgaagatcctccaacttatcttagtttgtctcttccttggactgacgagacggttcgagtcaacgagccggttcaacttaaccagaatacggttatggacggtggttatacggcggactgtttccggttagaaaggaagagcaagtggaagtagaagaagaagaagcgaaggggatatctggtggattcggtggtgagttcatgacggtggttcaggagatgataaggacggaggtgaggagttacatggcggatttacagcgaggaaacgtcggtggtagtagttctggcggcggaggtggcggttcgtgtatgcacaaagtgtaaacagccgtcgtgttgggtttagagagtttatagtgaccaaatcggaattgggaagatggagtagagtgataag

SEQ ID NO: 27192 - DNA, 620 bp, Arabidopsis thaliana
cttttccaccaaagacacatggaatcaggttcgtaaaaaatcaaacgaggtggcttggtataaaggggtatggttcagtcactctactccgaaatatcagttctgtacttggcttgctttgcgtaataggttatcaacgggagatcgaatgcagctttggaataatggctctgatgtgaagtgtacattctgctccacatctattgaaacacgagaccacttgttcttctcgtgtagttatgcctcagcgatttggactgcaattgcaaagaatgttttacaacatcgattctcaacagattggcagacaatagtgaattacatctcagagactcaaactgatcgaattcggagctttttgtcacgttatatcttccaactcacagtacacacggtttggaaggagagaaatgatcgacgccatggtgaggagcctagaacgtcagccaatctcattacttggatggacaaacagattcgcaatcaactctccatcataatctcgacaggagaccgccgctacgagaacggattacaagtctggttctcgacaaggctctagactctctctgctctttctgttaagctctcaaattgtaatttcttatcaaaacaaataa

SEQ ID NO: 27193 - DNA, 837 bp, Arabidopsis thaliana
tgaatgaagcaaactattcaacatcaaactaagcatttaccaactaaatatctcaagtttctagtaaataaaacttcagtttaattgagagtaaaatgagacactttgaataattaccgtaatggacatcatctgttcctaaagtcaatttgtcgacgaattaattatcattttggtcttttgtctctcttgaaatcataatcaacttttggtcaaaatccttttttcatataattgtcattagaaaacactcggcgatgcatgtgacagactatgatttcttacagtagaaaatgtaattgcctttttgttcatcgaatggcaattaagtttcaaaaagacaaaaactaatattcttgatccaaagaaattcaactatgcaaccaattcttttctataaagttaatcatgatataaaatgtacacagatatagagaacttttattttctgtaatgatatcacataactacgtactgtaattatcacaatctgaccatttataccgtaaaagtttcaacaactatatatatggtatgatgattattatatctttctacacaatgttttggtatgtcactcacttagtcacttcctctcttccatttccgttatccactaccgttcaacaagtggcatgtcgttctcgcgaaatctgcctcgttccataaatcaatctccggtatatagtaatctggtgttaaacgggtattacaacggaccggttcagtccatgatacggtgattgtgaagtctcattaacggctggtattgaatacgagttgggcccatttaactgtgaggcaacgagctgatccaaagcggcccagctagtgatg

SEQ ID NO: 27194 - DNA, 738 bp, Arabidopsis thaliana
catcactaataatgtaatcggaggccggatcgatctggtgacccaatcacaaaacttgtgaaccattattcgatcaatcaatgtaccgtgtgagccaaggctctttatttctaacctaagaattttcagatttaggttttgaggcctattaagattaaatgaacggtattttggtaaatgataactatatctaaattgatcgatccctagacaactctctcaagaagaagtagaagaaatcaaaagtttgatcaaaccctatgatagaaaatgacgacgacaacgcaactggcacttccctatgatttgctattgggctgcattgcacacgtcttctagattgtactatcctaatctttccttagtctccaagagctttcgatctctcgtaacttcaccggagctttacaagacccgctctctcctaggccacgccgagagctgtctctatttgtgcttacggttccctcctgacactaatctaaccctcgttggtacactctctgccaaatacctaaccgaatgaagaagaataattcaagtggcaaaatttacgtcccaatcctaatccaaccatctcccacttctcctcctccacaatcgcattcctcgaatcatatggttaccgttgtaagatgtacaaaattggcggggatgtgccttcttcttctagagtctctgtcttggattggaagtctcacacatagaaccaaactttaagcatgcgggtggacgggg

SEQ ID NO: 27195 - DNA, 1330 bp, Arabidopsis thaliana
catttgtacaagagaatgattaggaatacattgtcaccctttggtatctgatgtagacaaatattgtccagctgcaaagaataatcagctcgtaaacaccacaatatgtgccaaaatccactttacctgatccgttctaccgctttcataaacacgtattctgctttgcatcgtagtctgtatacggtgttggtcctgtacgaaattaaaagatactcctcttagtactcttcatccgctaaaataaggatatgaaacacagttattaattaccagctgtttgcaatagtctttccagctctcctcatttagtccaaagttgaagtagtctgtcatctcaactcctggatatctccagggcttttcttcaaaactatctatgtcgacctcaaatatagtcctaaaaagcacagagtagacagcaaataaaagaaacaaagaacaaatcagtcaaaaagattgatatgcagacatgagcctaagctactagaacctctagttcctgaacagatgaaaaattacttgtgagagggaagagtgaagtccagtccacgccctgctgtattactaccccaaggctggtggaaccctttctgtgcagcagaagcattcctcattcccagtggacgccaatctcctctgccacgaccagccataggaccaaggttggcgggtggacgaacttgacctgaggagggtccaccaacagatgcagcacctccaggaatgggagctgcccccggtcttacatactgcaagagaaatatatgtaaatgtcaagtagaacaataccacccttattttgtttcggcataacgttggtatgataactccaaataacataaataaaatctttgaaggggtgttggctttataaagttagttagtgtctcaagaaactggttattgttcttcttacagtcttcttcttcaatagccaaggaattacgaaaaaaaactgttgaacatcgtaattgatggtggtgtaggattgcgatatacaagagagaaagtgaataggttattatctccctttcacattcttcattttatgaccaaacacccggtctttgggtaagcaagtaaagagatggtttgtcaaaatctagaagcagactccaatttctttgattaacacactctgcatttgcattcaggtttagatacaagtacaaagtatatatgcactcagaatttaagaaaactaaaacagggtaacgacaagaaacccaggtactaagtaatctgaccagtgacaacagtgttgcatcgacactgaccttaaactgagaatgaaacggatgatcccatgactgctatccctgctttg

SEQ ID NO: 27196 - DNA, 488 bp, Arabidopsis thaliana
gactcgctccttgtgccctaagcttcaacgggaaaacctcagaactgtagacccaagttattgggccgagcccaatagagaaaaacgccacgaaactataagccgcaactatgctcagtactaaagcccacgctaatttcccgccagcattttgggccattgtaagcccaaatcccaacattgtcaacgcaatgaccattcctccaacgctggtcaacaaaagcttccttcgacctaccttgtctaacaataaagtcgcagtgaaaataaacgtcgttttcatgattccgacaccgatagtaaccaagaaaagcttgtctttagtcgtgattcctgctttcttaaagatcctcggaccgtataaaagcactgcttcgattccggaggcgtgttggaagaaatgaatcccaagagcagttaaaagaacacgtctcactgcaggagttggtcttagaatgagctctttccacacgtcttcaccatgagtc

SEQ ID NO: 27197 - DNA, 1511 bp, Arabidopsis thaliana
actaaatgtctcaatttccacattttcgtatagtttcggggcgagcttggcttacattagattcggggtctacgggttttaatggggtttgattttattcaggaaacatatgaaaagtttgtatatagtttgctcgagaagaagattccaagaattacaaaaagttccaattttgtagggttacatatgttactatccatcagtctctagaatcatggaatcatgttctctctgttttaggattcgggagctaattcgatattgttgacattgaacttgctttttcatgttagatattgatagtccctaatttcaagctccacacttgttggaacaatagaactcaaatcaatctagtttcttttttgtttgattagtctgtgtgttggaattgtgcttgttcgctgtcctcttatgtagtctcatggatgtttaccagatcaatatatatctgtgtttctttgcagacgttatctactggaaccgttatactaatctctgcagtagctgtgcttttgcttaacccgcttcttgcaccacctgctttcgctagctttcaaactgcagctaaatccggttggctaacaagtgcgtggaccggtttccttgctggttgcttgcacacgctctcaggacctgatcacctcgctgctttagctccgctttcgatcggacgcagcaaaatggaaagtgctgctgttggagctctctggggatgtgggcatgatgctggtcaagtcatctttggtatactgtttctgctacttaaagaccggcttcacattgaagtattacaaacttggggtacaagaattgtgggattgactcttgttattatcggtgctatgggaatcaaggaagcttctgagatccagaaccttgtgtcgctttagaaaccgacatcagcatggtatcaacagagaaagaagccttaccactgcccaaaaagaagaagatcgggtttgctacatttgcaactggagtggttcacgggttgcaaccggatgctctgatgattgttttgcctgcattagctctcccatcacggttagcagggtctgcgtttttgataatgtttctggttgggacagttatagcgatgggaagttacacagcgtttattgggtcttgcagtgaggctttgaaagagaaagttccaaggatcacagagaaactaacttgggtttcgtcacttgtggctattggtcttggattgggaattgtcatcagccctttctttggttttagcctctactgagaaagtaaaagcttcttcaggtaaatgagacaagttgaaatctttgtagttcttatagaagaaagagaggtttttttgggtccatatcactcgtattattgtcacctgtacgaacaaaatctcgtaatcttgcttcagaaactcctctcggagaaaacgatttggtgattctttttattttccttatttttaagagaagtttggttttggttctgaattatcgatcaactgcatgtaacgatactttgtaata

SEQ ID NO: 27198 - DNA, 541 bp, Arabidopsis thaliana
acaacttattaagtttacttaacttaatgcatatgactaataagggattcaacttaattaaactaaatctgtcactttcccataaccagatatactactactttgacaacaaaaacattccgtggcaaaactctttgctctacacaaagcccgctggaacgcagcagctctctttttaaagcccaatgatcgtaagattccacaaaacttcaaatgctcaacttcgtagacatctgttataccataagaattcaacaaccccttgttgtctgtagtgataataacaacactcccaggaccaaaactgctgaaatcccctgcaagagcttctaactgtttaaccttagtaacgttgtctgccacaagcagaaccttttgattcttaagacattgtttgttagagtcttctcttttaatatttctcgagaaactcgtcgtgtagatgcgctgagtggcgaccctgagaaatcgttttcacgtttccaagaaaacaatggctgtcaaactgttgacaagatgtctgataaacatatttagctag

SEQ ID NO: 27199 - DNA, 527 bp, Arabidopsis thaliana
gcttgagtaccatagccacttggcattccacctacagctcctgggctagctgtccctaatgtccccaacaaagcctgcccaaatgcttggtttaaacccaacccagcaccctgagatgccagcaaagctgtgagggcctggccaatggcgagattaaacgcctgcacagcttggttattaccagctatgaaatgtccatggcctccaggggcaccataaccattgttgtcgttcctttggtaacgggaattttgattgtgagagttatggttatgttgatgttgcttaacctgttttggcccatcatttgctttgtggcaatgcaagacatggccttcaaaagtcttgtgtggctcctccaatgccttcttggcactttctagggatctatagacaaacaaagcgaaacctttaggtctcccagtagctttatcaagccccaaaggaccttcttctatctccccaaaccttgagaaaaactccagcaacttctgcggatcaatgtctgcactaacgttactgacata

SEQ ID NO: 27200 - DNA, 659 bp, Arabidopsis thaliana
gccttctttgctgactctcattatcaaaatggtaattgcagagaagcagacatgaggacaatgagtgagaaaacgaactcgcgggtggcttggtacagtataatgtcactaggtgtttgcattgctgtctctggtttccaggtactctacttgaagcagtactttgagaagaagaagcttatatagagattccctgatattcaggtcctttaatgagagtttcttcttaaagaataatattcaattcatctcctttctttcctctttacacgcctcctttttactgacgctgtaaaatttttgttcatggattgtttatgtagcttctctctgataagaagtcattatttctgattctgaaataataatattaacttcttgtcatctccaaagtccaaacgaaagagattctagaaccattgatattgggttgtaactgatactttatgttagtttggggctataacacgtaagtttgacagtacaagggttaagattacaagaaaaaactaatcaaatgggtattacatacaaatcagcccaaatttctgacccaacaggcccgttaagagcaaaccctaatttcaaagagaatatatataaccctaatcacatttcgcaaccaccaaagcggaggaaaaatgccggctggacatgga

SEQ ID NO: 27201 - DNA, 1069 bp, Arabidopsis thaliana
catcccaagtttatgaacatactgagaggcaagactatcaacagttgcatcagaaccacaatacctctgaatcccttcaatatgtttctccaaaacgttttcttcaggaatcccaagatagatcatagacatagtttgctgctgaatctcattacatatataaggaatcttcttagcaccaggaccaatcgcatctctatcaagaggtccatgacaaacgaacccagctttgttgacatgtcgtctctcattgtatataagaagcgcaagtgaaggacgagcatagagtcgtttaaccacaaaatgacatgtacatcctctcatagattgaggtctcgcagctcgatttctagtgttgagacgatatttcctactgggtaacacaccaccaccttctccatagttctcaggaccaaatgaacaccaataccttcaataagaagtaaaacaaatgaaaaccacaagtgaaaaatgagatctttgagtactttgaaactgaaatggaaacttacagtctatattcaaatactcgtcgctcttgtactctttgagactgcctcgagagcgttttcttcctctttcgatgtggaatcgtgtagggcactctgcgtttgagcattctccgatgatgaattcgtcgactcttgcgtatggaactaatgctacttggtcgtgatgctctgatgttccgaatttggtccaggtcaaatcagcccatgaaaagtcttctacttgtgggttttgcactggaatctcttctaatgattcgactatttccatctctgttttgagtgagctgtgcgactgcacaggtcccagaaattaggttttttttaagagaggaattgaatttggaagaagaagatgaatattggagaggaaatgagaaatgttattacaaacaagtccacgtattattatttattttaacagtcgcccttatatttctaatttgttaattttgtcctaaatatttaaaatgagcctcggggaaccattgtttttgctttttcgtccccagcaaaatggctatatgtttgataaaaaaaaaaagacatgagtataagga

SEQ ID NO: 27202 - DNA, 732 bp, Arabidopsis thaliana
ggttaaagccagataagcataccgggtttttctacctaataaattccggttgaccataccagcttcgagattaacttgttccgagataaccggtctacgtgttgattcccctgttttaaggtttagccttatctccgacaaaacactctgaagtgtttcgtcgtgttcgttgaaaattgaatcaggtggcgtcatgcatgatccaatcacgacaacctcgtctgtttctggttcttcccaagagttccatagatggaaacaaaaacaatctggtacttcgatccattgaatcgacgaagcatctttcgcgtttttattcaaaatcccgaatcttgatttcttcttctcgtcgtaaaccaccggagaaccacctcttatcatctccggcaatcggaataccacttgttggtctggaatcactacgaaattctcagtgatcgcgaaatcgtggatcatcgttggttgatcaagcggaatctcgacgtctggtgatttctcaccgtcggatgtgaatctgaagtattttaagtaaggctttgaaacgacgtcgtagcttaaagcgaagagttctcgggtttcgggatcgattttcgggtgggctatcattgttgattttaactgaccgtcgaaatcgtaccgacccgaagtttctaaatctccggtttgagtaactttgacatggtacggtaaatcgtcttcggacatggctaagagatgaccattgaaataact

SEQ ID NO: 27203 - DNA, 595 bp, Arabidopsis thaliana
gaaatggttcttatatatgctctagaaccatttccatcttctgtctatgaatgttcaacaagaagacaaacatctaagcactagagtgacacctgcaaataggagatctcgacggaaatcgaagcagaagatgcgttgagaagtatatcctccagagctctaaccataataccacgctcagctgcatcatctttaccaatttttccaaccgtgtaagttttacctgtgccggtttgaccataagccataatggtaccattgtatccactcagaacaccctgtaaattcaatgtagtagatatcaataaccaaaagtattacttcttaacattccaataagttatataaacatcagacactttctaacctcgacgacaggttttgctactccttcatagacacgcttttgcgaacgtgtgtctgtaaagacttcatcaaatttgtatgactcagagttccagttgttcttcctcaacttaagcctctttatctgtacacacagaaacaaaacaaaactttgtaagaatatactaacacagagttgaaagagagaagatgtgattagtgagcatctgatactcagttctggttgtac

SEQ ID NO: 27204 - DNA, 898 bp, Arabidopsis thaliana
cttgtcttcagacatcagtaagttaatatatactgaggaaagacatttcaacaattaaacaagggaaattcattgctctacctgagtggatggatacatgatacatttagtgacccatgtaaggagtaccgtatggcccgacaccatgttgccctctacttgtaccgccttgaccaggttgcggagtctgataaccgccttgcaacccaggttgtgtaccgtacccaggcattgtccccggtgccatagcttgagtaccgtaaccagttggcattccaactccattccctgggtttacaccagcagctgtccccaaggaacccaacaaagcctgtccaattgccggattaaaagccaaaccagctccctgagatgccaataaagctgtcaaggcctgtccaatggccgggtttatcacctgtgccgttggaccacccatcccagctgggttaccagccatgagatgtccatgacctccaggcggaccataaccattgttatcattcctttggtaacgaggattgttataggcgtgtgggttatggtgatgctgctgctgcttgcccggtttgggaccatcgatagctttctggcaatgcaagatatggccttcaaaagtcttgtgtggctcctccaaagccctcttggcgctttcagacgacttataaacaaagagacagaaacctttaggtctcccagtatacttatcaagacccaaaggaccttcttcaatttctccaaactttgagaaaaacatcagcaacttctgtggatcaagctctgctccgacattactaacataaatctttttctgagtatgctccgagttcgaatgctgagcaggcgctgaaacagctgcagcagcgataggagctccaccaaagacaggtcctttaga

SEQ ID NO: 27205 - DNA, 808 bp, Arabidopsis thaliana columbia
agatcagatcttgtttatttacattgctaagacaccataggatgcatcattcatagaaaacattgtgctataacaaaagaaaagtaagacaatgccttaccataaccatccagatatcaggttcagcctcatagaaaacatgggaatgtctttctgcttcgatcacttcacaagccgcctccggagagaaaagtctgcattaatagtcacaccaagcctcaaaacatgaagaagatctacacagactatcgattaacgaccctgacttaatttatcgaacaagtcacaaatgcaaccaaatctagatcaccagcaattgtaaaaacacatctcacagtgttcaaaaagaagaagaatctatagcagctgacctagtaaaagtaataagcccttcactgagcccgatcactgataactgcgtcgagaagtctaaatcggcaggataaaagaacaaaattttctctaactcttgtccttcagtttgacctctcctcaaatcaaacatgcaaagtcgaaggctttcatcaccagagctcatggacgccatttctggtagcttctacgagctcattaataccctaacaatacaatgcaagaaccgcgtcagaatcaagcatgttacaattggttgttgtttccaatgtggatgtactctacttcaaaatccaaagtaatttcagggtttcaagagcacattggtgattcaaccacggcacacaaataccaagtaaggttcctaataagaagaccgaagaacccatacatcgagaagagaaaattactgtagaaggctaggaaacggaaaaaa

SEQ ID NO: 27206 - DNA, 447 bp, Arabidopsis thaliana columbia
agacagcacgatgattccaaggattctgcgataagtggggaatttggctcaacaaaaccacgcctcaaggcctcaaggaaacggccaggccaaagccctaataagaagattctcgacagtctcaaaagcgcctcgactccaaaagggcagatgggccgaggaacttgaaggagtgttctggtcgcacagaacaacgcctcgttgcgccagaggagaaactctattcacactagtttacgacacgtaatgtataaacccggctgagagggaagtgcttagcttgcgccaacgcctatatcctaagcatgagcaagacaatacttagagaatgctcgatggattagatctaattgatgaaagaagagatccagctttggttcggtaattggtactgaactatcagtacgcaacgactcatatagctcggggcaaactgggaaggaccag

SEQ ID NO: 27207 - DNA, 611 bp, Arabidopsis thaliana columbia
tactgatgataatggtttgatttacgcacattctaatgtcatcgtaagttctctaatccaatgcttagaaaaatcagtaacattgttttttgtattgaatcttaatgaagttttatctgttaaactttaattagggaatggcttcagatgtaatcagaggaatgatgaagcaacataagagaaaatctcatcgtaaatcgatttcaatcctcggtgttcctcaccacgctcttcgagttttcattcgattcttatactcttcttggtaagtagcaaaagttttggattttacaaatctttggctataaacatttagggatacatacttaaacattttgtttcttgctctgtttttgtagctatgagaaacaagatatggaggattttgcaatacatctacttgtgttatcacatgtctacgttgtaccgcatttgaagcgagtctgcgaatcagaattcgaaagtagtttgctcaacaaagagaatgtgattgatgtgtttcagctagctcttctatgtgatgctctcgtctcggtcttctctgtcatagaatgattctaaacaactttgaagaagttctacttctgaaggatggcaacaatgaaagagag

SEQ ID NO: 27208 - DNA, 934 bp, Arabidopsis thaliana columbia
gtttcgagaagaaatattgataaggacacgtgtcagtaatctagcgtcgatgtgtcagctacgtgcagagatccggtttaggagatttaacatttcaaaccgacgatttctttatgattccgcatagaattacacaaaccggattcggtttgtagctatggtcctatgatgatgatatatgtatataaacataacattacaaccaaattaagaaaaaaagagcgaaaaattctgaagcaacaaaaatccattttttttcttcttttcttaatacacaattaacgaagcagaggagcaatcaaaagcgagagttttgattcttcggcttccctctcgacgtcactttgatcatgagatttctcacaatgttcttcttcttcaacccaatgatccgtacgcagtcacgttttttcttgaaccgggtccatcctgattcatacctactggtttattcgataaccgacgtttataccgcttcaaaaccgaagccaaattctctttcccctttgggaaagccacatcacctgcagctgtaccggttcggccttttctacaagagattgccatttcaacgtctttgattagatcaagaagtgtgactgcggttgtgcatttgcctttagccggttttgcagccggaggtaacattccgttagctgaagtcggactcgctctctggtggctcgctggaatctgaaggcaaaagcacggtgtcattggtgtccgcagctttgagaacgccggatcaatcactccctgtttaaatccatacatgtcaatattttcaaactgcaaaactgtgattttcaatgaactactgcggtttttgttacctgtaggcggttgagaacgtaagtgtactttccccaaagctcaggccgactctccatgagagacaagtcaaggacacggtgaatgcaccaaactccaaagc

SEQ ID NO: 27209 - DNA, 388 bp, Arabidopsis thaliana columbia
tagtagatgccgatgcctcgggatatcctgtttcgctcccttctacataatcctcatcctccgttttctgaactgtggttttcaagcgggttacaaaagcctctggcggcttgtgatacacagaggacaaggtggatatatttgcaagtagctcatccaggagcgacggatcaagttggtttgagtcatcagtaatcacaggcttttcagctaaaacaacatccttggccgcctatagtcaaaagaagagcactgatgactgtaggtaaaagagatgattgttgctcatcctccaatgtccttgaactagtttagtagagtatattaagaaaacatacctcaggatcagtcgatagaagacgccagtagatgtatgcacgatccctga

SEQ ID NO: 27210 - DNA, 575 bp, Arabidopsis thaliana columbia
tcatcgttatattctaatttggggtcacgggtgggagtaccctcgacttatgatgacatttctcaatcaagaggaggctacagagatgcctacagtttgccacagagtgcaacaacagggaccggatcgctttggtccagacagccctttgagcagtttggtgtagcggagaggaatggtgctgttggtgaggagctcaggaatagatcgaatccgatcaatatagacaacaacgcttcttctaatgttgatgcagaggctaagcttcttcagtcgttcaggcactgtattctaaagcttattaaacttgaaggatccgagtggttgtttggacaaagcgatggagttgatgaagaactgattgaccgggtagctgcacgagagaagtttatctatgaagctgaagctcgagaaataaaccaggtgggtcacatgggggagccactaatttcatcggttcctaactgtggagatggttgcgtttggagagctgatttgattgtgagctttggagtttggtgcatcaccgtgtccttgacttgtcctcatggagagtcgcctgagctttggggaaa

SEQ ID NO: 27211 - DNA, 540 bp, Arabidopsis thaliana columbia
ttaatatattttttccgactcgaaagttacaaataccattttttccgaagcagatacgagtcagctaatagggcgaggtatgagtgctaggctgctagctatggaggagattaattattttatttggttgtatagttttcaactaatataaattccattaaactaaagaattagggaaaaagaaaagaaaaaacaatggcctcctctttataaccttaccttataattccacctgaatttctttgatgcgaaccaagacgaaccagctaaaaaacatataatttggttatagcaagaagaagaagatgaagatgaagacagttcttgtaatcataaactgtatattcttggccattggaaactgtggaggccctctaatgatgcgtctctacttccaaaatggtggcgaaaggatctggtttccaagcttccttcaaaccgttggttgtccactcattttcttccctcttctcttatctttcctccgcgtcgtcgttgccttgaagaacaagaaacgactccattttccatcatgaaacc

SEQ ID NO: 27212 - DNA, 537 bp, Arabidopsis thaliana columbia
ggatcccctctattttaatataaaaattacgtcaacatctatgtgagtgtaccagtaaatatgtgtaaatagtgcagcacgtctcaaaattcatggaagtctctgcaaagtttggtttttagtatatctaaatgtattaagaaaatagatgttaaattaatagatgcttcaatgtaataatatatatacatgtttaaatttaaacatttcttgaatagagattgtgttcgactgcattgaacctcttagaaatggttttgaagtaatgtatgcatgcatgtttctactataatgatgacggtaaatcatgatgacgaggaagcatgtaaggtatgtgcatatatacacatatatgtttataaatgcataaatggatatagatgtgagaagatgaatatacgagagtgtaaagctcatcggaatggcccgagatgttgacttttggaggattgactgcggtggagggtttgatctcgcagccgttagtgatgtgtttggggccaaagtagacagacatattggcggttgggatgacat

SEQ ID NO: 27213 - DNA, 454 bp, Arabidopsis thaliana columbia
tggaatccacagtgaaaaatttgccatggcgtttggtctcatttcgtcatccggtgcatctaagacgacgataaggatcttgaaaaatcttaggatgtgccgagactgccatgatactgcaaagtacgtctctaagagatacggctgtgacatattgttggaggacacaagatgcttgcaccactttaagaatggagattgttcctgtaaagattattggtagagtgattattgattagccaaccactaaggtacgacttaacttaatttcaacagtctttttaaccacatgatcacgtaatatatatatcattctcatattttttacagctataaaaagattattgagttagcagcatggcgtgggtaaaattagttgaagtttgaaagctaaattccaatccttgtaactaactacggaagttgaccaaaggttcaatagtgcgtatttttg

SEQ ID NO: 27214 - DNA, 503 bp, Arabidopsis thaliana
ggaggagaaagttaagaaccttttggaacaagtggaagcacttggtgaagaaggcaaagtggatgaagctgaagcgctaatgaggaaggtactatttgtttaccattctctaaaaaaagaagacttttgaagtcttaacaaatcatactgaaacttgaaatatggtgttctgcttgattcctccgtatttgcagttataccttatgtgtcacctttattatgatcataaatttagtacattgagtgcttatcatttggaaactctggtaggtggaagggctaaatgctgagaagacagtgttgttacaacgaccaactgacaaggtactcgcgatggctcaggagaagaagatggcattgtgtgaggtttgtggttcatttcttgtggctaatgatgcagtagaaagaacacagtctcatgtcactggaaagcaacatgttggctatggcttggttcgggattttattgctgaacaaaaagtaagtctcagaactaatacttg

SEQ ID NO: 27215 - DNA, 516 bp, Arabidopsis thaliana columbia
ttcataaatctgacactggacccaaaacagagtaatgcaactcttagttatcatcttctgggatcggagaagaaacctacggcccgaggcatgtcttgaatgcagagaagactcttcttctctttgcatatgagatgtaatcaattgaattaaagaaaagggaggaaaaataaaataggaacttaatgaattgacaccatcagctacgagtctcaacggttttgaagagtttcgattgcctttttccactgcaaagctctttgcttcgcatcttcaaacgataaaactttcttcggctgccaaaacaaaaacaagaatcaacaatcacatttcaattgcagaggaaaaaacctgaacaagggagccattggattgggtattactgtgcaaatcttgaaatgggaaggacttgagacttgaacgttgaggtcgttggagttatcagaccagataatattcccttttactacaagctttgatgggtcaacgtatatcagtcttggtttgttggtgagt

SEQ ID NO: 27216 - DNA, 426 bp, Arabidopsis thaliana columbia
agaggatccctgtaacaaccatttactattttcatcaaccacaaagtctttatggtaacgccatttcttcagctttcctctaaacaactctaccagctcaggcttaatcgttttctgcttaaacccggctctaaccattctaacctgccattgcctgtaagtctcaggcctctccactcgatcagcttcctcgcacgctatcacgttcatagcctctctcccgtaaaactccctctcgaacctaatcctctctttgttatcccgaggcaacgtcgaatcaaacatgtcgaagagagcggagtaatggtaaaccgcttctttaaaccgcgagataaagaagggtgcgttgaatgaaccgttgacaatcgcgtggatgaaaacgtccgggttcatgtttcttattagcttcaagacagcatctctcgg

SEQ ID NO: 27217 - DNA, 607 bp, Arabidopsis thaliana
tcgactctagactatatagcactatggagttgtccggcaatatccctttgtacactgttccttggccaccctgacccaggatcctgctctcagcataaccatttgttgctttcttcatgccatcctcagtaaagattttgacatcaacatttgacggccctgctcctgagagtcgttgtgtcaacatgccgccaccattttgctcgaagaattgttctcggagcttggtgtccttcaggtgcttcattctctgttgtatacaggcaacgccaagcagaatgaccaagaagccgatggtggttactgatcacacacatcgtagattcagagagatgattataataagttgatctgggaaacatcaagtcgagaaatagtgagggaaacttaccaagaagaattgtagtccatgcaaactctttacgcttgcagctcatagtggtggtatctaagcggtaaccagattgacacttacaatagaagcctccaaccttgtttctacaggttttgggatcgaacagttatgtctatggatagtactactagtagtacctcattgacgtctggccaaagaaaaagacgcaagattcacaagatatgtaatggg

SEQ ID NO: 27218 - DNA, 978 bp, Arabidopsis thaliana
ttttcctgggttggtttatgtttggcaggatggttctcgagcagccaaggccttctctagggttagatgtgtactacgaggatttgatttcaagacatatatcttcttcttcaccattgtccctattttcatctttggagtctatttgcatggtcagaagctcacatatttcttgagaccgctttggggaatctccaccaaagccgtttcaaacgctaccccattactaccatgagaacgcctccatggcaacactctgcagtcttcatggctggaaacaccgtgaatctccgagaagggtctttgatgctgtgttgttcagcaatgaagttgatatgcttactatccggtggaaagagctttatccttacataacacagtttgtgatccttgaatcaaactctactttcactggtttgcctaaacctttggttttcaatgggaatcgagcgaagttcgagtttgctgagccgaggctgagttatgggaacattgcaggacgattcaagaaaggagaaaacccgtttgtggaagaagcttaccagaggattgcattggatcagctgatcagactggctggtatagaagaagatgatctgttgataatgtctgatgttgatgagattcctagcgctcataccatcaatctgcttagatggtgcgatggatacccaccgattcttcatcttcagttgaaaaactacttatactcattcgagtacttcgttgacaacaaaagctggagagcttctattcatcagtacaagcctgggaagactcgatacgctcatttccgtcaaggcaacactcttttagcagattctggttggcattgcagtttctgtttcaggcacatcagtgagtttatattcaagatgaaagcgtacagtcacaatgaccgggtcagattctctcattatctaaacccaaaaagaatacaagatgtgatctgtaaaggaactgatctgttcgatatgc

SEQ ID NO: 27219 - DNA, 570 bp, Arabidopsis thaliana columbia
  unsure (1)..(570): unsure at all n locations
ggttttcttcctgtcaagagctccaatagcacaacaccaaaactatacacatcactcttctgcgttatctgtcctgtcattgcatacctaagacaacaaaactcttacgttatcaagaactatcaggttgttttaaacaaatgaattaacgggtttatggtataatactctggagcgtggtagccgaatgttcccaaaacacgagtagaatgaagcctagccgcggtatcggaggaagcattggtcaagttgaaatcagccattttggccacaaagtcatcaaacaacaagacattgctcgacctcacgtccctatggactattggtggctggaccttctcgtgaaggaactcaagccctttggctgctccatatgcaatctttaccctttggttccagttcagcaccggtcctggctcagcccttgcactccctttctccctaaagattcaattggtccatatatatttcatgtaccatatactaaaatatgagtagtgagagttaaaatttacgtaccgtgtaatacatcatgtanagaacatttagttgcaaactggtaaatgagaa

SEQ ID NO: 27220 - DNA, 534 bp, Arabidopsis thaliana columbia
tgcttcagattcgcaattgctcatcaaagctctcaattcagagtcctcttcgaaggagctctactggattcaacaagatatcctctcactttctatggcttttgaagaaatttctttctcttatgtttctagatcacttaattgccgtgcagatgcgcttgcaaaatttactcttggggcatttattgtaccagcctctataccaactttctcaccggttcaatcttaattgaaattggttttttgacaaaaaaaaaaaaaaaaagattattgatatgtagtagatgcactcgatacaagtacaatgcttacttcctatgttaaaaacattctatgaagtatttctgcttaataaacacgattatgggaagaagaaaaaaatcattcgatgaagtatttctcacccaagctctgttttctttcaatgtctataattaaaaacattcagaaaggttacatataatgtaccacaggtttttgattgactaaaatttaacattcattcaaaacaagaagaagattaattcagatttt

SEQ ID NO: 27221 - DNA, 392 bp, Arabidopsis thaliana columbia
aacttgttttttcattggtaacttttcgaacgcacgtatcaagaagtttttatctttgaatatgcagatagaaatgatatacaagatcatagcgcacatgtctgcaaacgacagagttctgatagcagaaggaaactgtggatcgccacgaagtatcaaagtgtatttgggcgagtgcaatgtggatgacctgtacgcataacaaaacccaacactttctcaaactccaaactctcattctctccattccttatttctttctgccatgtctatgattttgaaaaagaaaaagattgcaataagagccaggaaacacttgtgtacttgttttgaaataaagataatttcagaatgttacaaatgttgattgtaatgataacattggagataga

SEQ ID NO: 27222 - DNA, 372 bp, Arabidopsis thaliana
ggttggtaatgtttaacttgaatttttttgcagtacatgaacacgttgaactatataacaaatgaatctttctcatctataccctcggaattggtatctgatttgcaaaggatgctatcaacgaacgagtcctttagaccaacagcattagatttcacaggtaagtggagataactttgacgaggtttccttctttcttgtggcaaattttctctttttcttgttagttacatctttaacttgaactctgactctgtaggatcgaattttttccgaagtgacgctaggttacgtgctctccgcttccttgatcatttgcttgtacgtgtatatgcttccaataattgtttcagccacaggtgaatattcctg

SEQ ID NO: 27223 - DNA, 1305 bp, Arabidopsis thaliana
gtcgtcgactctatccccccttttcagtgaacaacaaaactctatagtttaactattctgaaatgaaaaatgtttatttttaaaaaagctctattttgggattaatgaaccaaaacaaaattatataatttcatatttaaaacaaatgtagtacgaattaaataatcctatatatacaccaacttcacactccatgactcttcagacaagtcggtccactaattcaaattttctccattctctcgttccaattattatttacttttttcacccaataaaaaaaaaaccatgcattcacttccggtgaatctcgtcctcaccgtacttacggtgttcctaacatcaccggcgcaagttatcggataccgtccatatccaccaaaaaccaacggctccgatcaaatcttcgacgcttcaaaaaaattcgaaggctcatcgaatctcgtccgcctccgttaccacatgggtccagtcttaaccaacaacatcaccgttcacccaatctggtacggcacgtggcaaaaatcccagaagaaaatcatccgtgagttcattaactcaatctcagccgttggatctaaacacccttcagtctccggttggtggaaaaccgtacagctttacactgaccaaactggatctaacattaccggtacggttcgtctcggtgaagagaaaaacgaccggttttattctcatggtaaatcacttacccggttatcgattcaatccgtgataaaatccgccgtcacttctaggtctcgcccgttgccggttaatcccaaaagcggtttatatcttctcctcaccgccgatgatgtctacgtgcaagatttttgcggccaggtttgtggatttcactatttcacgtttccgtcgattgttggattcacgttaccgtacgcttgggttggaaactcggcgaagctttgtcccggagtttgtgcttatccgttcgccgtaccggcgtttataccgggattaaaaccggttaaatcgcctaacggagatgttggagtagatgggatgataagtgtgatagctcacgagattgctgagctggcgacgaatccgttggttaatgcttggtacgcaggacccgacccggtagctccggttgagatagcggatctttgtgagggtatttatggaacaggaggtggtggttcgtacacaggacagatgttgaacgatcatagtggtgccacgtataatgttaatgggatccgacggcggtatttgatccagtggttatggagccacgttgttagttactgtaccggacccaatgcgcttgattagtga

SEQ ID NO: 27224 - DNA, 1060 bp, Arabidopsis thaliana
agaggatccccggatcaaagatttgtcacaatttttctttatgatcactaatttttttaaaatcaaattagaaacgatttcattaagattttaaaatattaattaattttttgatgtttactcttgtttattcacaagctcataacagaaaatagatacacttcagaattatgtaagttatttatagtacatttattagaatccatttagaattatttaatacaaactaaaatattggtcggctgattagtagatacaagtatatctatgcttaaaaaaaaaaaaagtatatcaatgctcttcggataacttacatttcttacaacaaatagtaaaaagagagtgtatatgtaactatgtaagtatgtaacatatatgcaaccttttcttgttaaggatataacatgcaacttacgaattgatttacttttttgcataaaagctacttacaaagtttcctccggtgtcaggaagaatccccgcggctgcgacagcatagttgacaccacgaagtacttgatctccggtagcttccgagtaggccggaatcagtggcagccccaatagttgagctatacgatcaatgcatgcatgcatcgtatataatacttatatcagcctcgttccagttttaggaggaaggaaaacttattataatgcatagagtgaaaacttaccaatcccatcgaccatcgttaagccattgcagaatcgaccggtcggaccgccattgaaatcaatgccataaggaaaataattggctttggcaaaggaaggaatgttattgttattcccattgtctattagagagtcaccgaagacaaacagcgccggcacaatgccatcaccggtgtttaggtcgaccagcagaggcggaggagcagaaataggtcctcaaccacaactagttggccagagacgccatgaaggagttggagactacggcaagaagagctgagaagaagcaaagtcgccggaagtggaaagccattatgaagttgtttgtgttagtaaggtgtacttttacatttgtaggttgatttggggtaagagcaaatag

SEQ ID NO: 27225 - DNA, 570 bp, Arabidopsis thaliana columbia
gaaccgccactttcaatgctaaggaacttcagggatgctaaatctgtgtgctcattctgtaactgcaaataaatctacacatacacctgattggacagcaatggtggcctataaaagagccgttagatctaagctcaaagaatatatccattccggagacagaaaatcttgaaataagacttactaggtctttgtagaatggtgtttgttcaggaagtagagcacgatcagcatctacccttttacttgcatattgttcaccatatctacttgtatccaattgtccacgtccataatcaggaggaccagataggaaagcaaacaccctagctgcacttatatcaagtcaataaaacaataccagctggccactacgactatgttgaaacatatagagtatgggcatgctaaataatttcacatacctgatgcaaatgtatcccaaattcagatcctagatagttgaatagagcttccatagctgtaccaaagcccctaccacccatcaacacactatcgatcccttgacctgctcgagctgatctctcccaagaagtaattggtctgagt

SEQ ID NO: 27226 - DNA, 576 bp, Arabidopsis thaliana columbia
  unsure (1)..(576): unsure at all n locations
nnnnnnnnnnnnnnnnnnnnnnctaaagcactcattggcttttgcagttcatcgaacgtcgtcgcgctaaagccttttacctctggcggcgtcacggtggttgcgggcgttctcaaccccagtaccttttgcgcaataagctgtcgatcaaccgtaagatatagcgcccgacgcactcgcacatcgttaaatggcggtttctcaaggttgaagttgtaatattcgctgttcagacgcggaataattcgtagctcgccaggcagtgatttttcaatggcgggaatttgctgcgccggaacccaggtgagatcgacctctcccgcgcgatagggttatagccggtgaccgaattatctagcgccagatactcaacctgttgcaatactgtatgttgcgcatcgcggtactttggatttttgcgtgcagtaatcttttcgttaactacccactgatcaagcacaaaggcaccgttgtaaaccatgttctctggcttactccagctatcgccatgtttagcgatgacatgatgaggaccgggaacagcgtcggccaggcgagcatcgtcgtgaaccaagg

SEQ ID NO: 27227 - DNA, 558 bp, Arabidopsis thaliana
tcgactcatccctgtgatatctcaaattttgaagtagtttttttatcatcaaaatatatttggtgagtagacatacagtaggaattttgagataaccactaggagcaagatgatcctgcagggttattaaagatatatgttaattaatttgtaactactgaggatttaatcctaaaaaagacagaaagagatttatacttgaatgaagtcgctatagatatctcccttgattagctcatctgctaacttacagaataaaccagactttaacaagaaaaagacaatgttgttactgtgattgattgattaaattaaaatcatagaaaaaatatttagagaaaaaagatttataaaaaaaacttacaccacacataggaacagaggagatgccagcatgaggaccggccaaggatatatagttgtaaaccggagggccaccgtcacagaactcgatcaagcctcgagccactaggttcccctgttccattattaatcaacatccatgaaacttaaacactatgtaaataatgatcaagaacctattttaggattttcaag

SEQ ID NO: 27228 - DNA, 852 bp, Arabidopsis thaliana
cacacaactttaacaaatttctgctatattttacagtaccctcaccttcgataagttgtccactttccacccgtgattgtaaccagaccaggattttcctcgaagacaacgtggtctctggagatactctctgtgctcttggctgttggatccatggccaatggacggatcccactccaagccgaaagaacatcagtacgtcgaacctatataagatttaggatgcataacatcatcaactgaattgttagagagctattgggtcaaaaatagaattgattattcctcattaatctgaatctggatataccttaatgttaagatagtcgctgattgcgtccagtataaattgaatctcatcttcatgaggttctggaagtgaagtgattgaagtattagagtctgtagtgcctgctactgttcttcccaaccacggtaacataaacacaacgcggccatccttagttttagggactatcaaccccatgccttcaggagaatagtaatcaggcagcacgatgtgtacaccgctgcttggacaaatcattggttttgtatcttcatcaatcattttcctaatggaatcacagaacggtcctgccgcattaacaactacttttgcatagctgttaaattcttggcctgtcaaattgaaacatctcatcaaaaactgcacaaatcatgacagagcagaggtatactgaattgcacgaaattgctagtcgttttacctgtgagattgttacgaattcgggcaccaattattctcttagtagcatcatcagtaataagcgagacaacctcggcatggttgagaactgccgcacgcagtaacgcggcagtacatgccaa

SEQ ID NO: 27229 - DNA, 640 bp, Arabidopsis thaliana columbia
aaatcagtgagaaagcccaaaaaaactcaatattcatataacagagtgagagtaatagattgattcgtatacaataaactcttacatatcgcttttttaaataaattttctagttacgctgctgcaggctactacgagaaacaaaaacaggtctaatagattagttgactctaggttttggctcggatgtttaacatggtgtgttttatacccaacgagcaactacaccgcatcattagtcggatagtttagattcggatcactcaagttaattataaaataaagtgtatagatttttatcgtacatacatactttagtttagtaaacaaccaaacataactgtacgttacaacattctgtttcctctctttttctgccatcagaaaaagacgcgtacacgtttctttgcaactggttcgagaaattcccagagcacaaaggaaatgagttctacattgcaggcgaaagttacgcaggttaaataaaaatcatcttgtgttttttttactaatatgtctaattcggttttataaaaatttaactaatatgtcatcttctgttaaatcatcttgtgtttagtttttatattgtctaattcggttttataatttttttgggcaacgtgtgtgtgcaggaata

SEQ ID NO: 27230 - DNA, 435 bp, Arabidopsis thaliana columbia
ctagcggatcgaatttgtatcggtctagatttagccggagatggtgtagctgatgagaaattgtgttgttggtaatggtggctggtccttgatggtgaactaggcctttggctacggcttggacttgcaccggttctcgagttacagcgggttaaatacggttgagaagtatcgatctccacggttttgtaaaccggtggtactctttgatccgttgaagctcgtttatcccacggtttagaagccatccatctgtctaaccatttcggggctctcttcttcaaaaccgcctcctgaagattactaactcttgttctccgaacctttcaccgaaatcaaactaccgaaacgaatcaaattaccgaaaacaaacaaacgattaatatgaattcatatctattacctggtgagagaaagcttgtgatatacgattgt

SEQ ID NO: 27231 - DNA, 902 bp, Arabidopsis thaliana columbia
aacacagcataaaaacatacatcagcatcaaaccaaaacacaaagaaacaaaaatcaaaaaatgcaaaaacaaaagtaaagaaggtacttccggttataacaacattccgtggaccggctcgataatgatcttccaaaaccatgttagcaccagtcatggttccaatgataattccaccaagccaactataccaaaccaatgagttcatcgaactatctccacctttcatcacaaatacatacactcaaaatctcagtcaaacaaaattaccaataaaaaaactcttctacaatagtttttgcactaacctgataattgaaacccaatcaaaagaatagctccagtacttgtcatcgtcacaatgtatctcgcaatttgaacagcaacctacaaaatcacaaacacataaaaattaagctaatcaaagcaaaaagattgaaaatttcattaagaaaaaaagaggaaactttaagactaaccgaagagaaaaccatctccaagttttcaactttctgattatactcatctttagacaagaaccctaatttactaaaccctaaaaacccagatttcaaagaatcccacgacccatttcccttaaatttctcaacttttctctttctttcaacttttttctcacaccgatgcacataaaccctattactacgttctctacaagtcaatcttgacccgacccgtatcggatctctgaagaagagacggtgctccaagacttgtgggtacacttgaatcttcgttaaagtagtcatagctatggaagaagagtgagataatgataagctttgaaactcatacaaaaagataacttagaaaacaagataaacgaaggagcttttttagggacccaaagatagattgttagatatttttcagcttcgga

SEQ ID NO: 27232 - DNA, 558 bp, Arabidopsis thaliana columbia
ccatgtgcagttacaacaacgaatcaggcacagaccgcattggagttgttgagggagaacaagaataagtttgatcttgttattagcgatgtcgacatgccagacatggatggtttcaagctgcttgagcttgttggtcttgaaatggacttacctgtcataagtatgcagctctccttgtcctagttcatagttcctagagaaagttttgatcgttagacagatttgactgtttgaatctttaacatgatgattgaattcttgcagtgttatctgcgcatagcgatccaaagtatgtgatgaaaggagtcaagcacggtgcctgtgattatctgcttaaaccggttcgaattgaggagcttaagaacatatggcaacatgttgtgagaaagagcaaacttaagaagaataagagcaatgtgagtaatggttcaggaaactgtgataaagcaaacagaaaacgtaaagaacagtatgaagaggaggaagaggaagaaagagggaatgataatgatgatccacggcgcagaagaagcctcgtgttctttggacgcatga

SEQ ID NO: 27233 - DNA, 587 bp, Arabidopsis thaliana
ttccctaatttattgacttcatgcttatcccaacaaactcccctttaagcttgaagtcatcttccaacacacactgaactcctactagttctctcatctctctgaacttaatccttccaagtggcttggttagaatgtcagctctttgctcaactccgggaacatgatccacttcgactaagttattctcaacacattctcttatgaaatgataccttcgatgaatatgtttactcctaccatgaaagacaagattcttagtaagagcaatcgccgacttgttatccactcgaatcatcaccttctcacttgttgtcccacacacttctgcgaataggtcttgtaaccatatggcttgcttggctgcttcagtagctgccatgaactccgcttcacaagatgaaagagccactacttgttgtttttgtgaacaccatgtaatgggacattgatgaagatagaagatatgaccggcagtgctttttccatcatccaaatccgcactatgactactatcactatagcctactaatccgctcttgaatcctctcttgaggtacagaccatgagacatagttcctttgaga

SEQ ID NO: 27234 - DNA, 508 bp, Arabidopsis thaliana columbia
caaatcatatgaactgggtgtctcaggataatgtggataaagatcccttagagatattactcttaacgaaaaagaggcacaattgtggcaagtaggccatattgagtttagtttggaaactagttgttttttaaattcggaaactcgaactcgagtgagagatatttcacaaaatgattcttatttaggatatcacccttttttggacgggtcttggaaagatagtgataaattctcaggaatatggtggttcaatacgtcatcagatggagttacaccaaccatgagagctgccaacacccttacacgcatatctccactacattcggaagtggaagctcttctctaggcgatgaagtgtatgattggtgttaacaactaaaaagtaatgttttttcgaaactattcaaatctagtgaatatggtgtgttttctaccgaatggccgacactttcagtgtatttggaagaacttcagaatgataaggaagaattttcaatttttttgt

SEQ ID NO: 27235 - DNA, 651 bp, Arabidopsis thaliana columbia
ttcttgtaaatgcaaaaaaaaaagaaagttttacgaaaagtaaagaaagaaatatcgtaagttgggacgacgacgacgaagatttatacagaggaagagcttctcgctatcgacgccagcgaacttcctatctctcccattcttcttgttacgctactccgaccgtacgtgatacgagctccggccatgaacacgaacatccaattgaaatccccaatttccctcgccagatgcatcattacatcacttcttctgcagcttataaccgattgtcgaggtaaagatggaaaagtggattcatcagtctccctagagatctttagctattattttcgaatttcttatcgcttagaaatttctgggttcttggtgatctcaattcatttgttttatcaactttttccccatctgattcgatttccaaagttgttattttctcaattgttcataccccaatccatttattaaggtttttgtcactacaatgatgatgttaacgttcccacttgtgtgcaaatatgattctgtagctaagcaatctaatccgttggttattgacttgtttgttgcagctaaatctagctagtgaggttgataagtgagaaatgcagcttcttaaggttctcgatcccaatagagatgatattgagt

SEQ ID NO: 27236 - DNA, 650 bp, Arabidopsis thaliana columbia
acttgcatcttatgttttgtcttctcatacgaacaatatactttccaaccacatttaacaccatcaacaccaatttatgaccacttcgcagcaacaaccatagattcagacccataaagagaaatggtataccatgtctttaaagagtacatcaaaagaacacgcttgaagtcgtgtttatatcctcttcaccgcgtaaaccaccattataatcgttatctccaccaccaaccacatcatcaacgacattgcagtcttcatcaccatacacggcgcagtcttcttcatttttcagggtcaggctcaaatgtaggttcttcatcctcctctttttaatgtctgactcttcttcgtttttgttttcaaagccgctttgaaactcgagctttaactacgatagaagactctactacgcctacagccggcagagctagaactccgttatcaaactctaaaactgcttccgctggtggagctcgaacaacatctttggtgtcatcttcgcctcgtggtggagcttcatcattgtctaatttgccttccattgatacaatctaggactccaaggatacaaattcaagatgaaatcaaatcaaaatcgcgatttcgcaaagtaagaattagggatttggtttttggaaattagggat

SEQ ID NO: 27237 - DNA, 1298 bp, Arabidopsis thaliana
accagtgattccatttatctttgtctgattccatccattctcttcacagttaggttctttatagtaactcccaataatgtgaattctgactattctaaccaatcatctcctgagcaccttcaacaagcagttctcgaacttacttcctagtagtgattttctttgtattgattttgttagagcatgtatatgggtgatactcatatagtatcggggctttttttttagttttatttataatatttatttattatttaagaatttttatgatattcctactaaatatgtttgcattggtgagaccagttaagtatcaaaaaaaaattacaaaatcagaaattaatatagtaaaacataagattactacaaaaaaaaatttcttctgatttgagtgaaaatactgaccaaccgtatgctgtcacgtcacctgatactgagtatcaaagatatcagttcactgatacaaatcaggcccaaattcatagtttgatataatttttggtctactgatatccaaaataaatcacccattggtccatttggtgttctagtggcgggcccaaatgaagccaataacaacacctacaaggccactacaggcccaactcaacaattataggcccatctttatactgtaccgttaagataaaccttgtcaaaatggaataagagagaaacatctcttctggcgaaaaaaaaaaaaagagaaacatctcttctactattgttgttgttatttttgatgctacaaaagtacaaagtacattacaatacgaggattgctataaacaattcaaaatcaacatcctttctttacaaacctgagaaatcaatgagtcaattggtgtttttttcaagtgtcccatatcataacaatggcaatgacaacaactccaaacaacacagccaaaaacttataacgaggctcatcaacatgaactttcttgtttggtcgatacccttttgccaacaaatggttcacagatacatacacaaataccccacacgccaagctcatcgacaatgcgaatatccaatccgcgatggacccttgagtcgttgcatcgatgactatcccgatggcaacaccaattgggctcgagatggcgaatcgaaagaataagtgattgaggagaataaaggacggtcagggatcatacggagaagagctatccccattgcaatcgctgcaaatatcttatggagtgttattgtccagagagctctccaagcatctgatttagtctctgaaataccaatagctatgcgttcgaagacagagtgaaaccagagagcta

SEQ ID NO: 27238 - DNA, 593 bp, Arabidopsis thaliana
tgaaaattgaatcaggtggcgtcaaggggacaatgacaaccacacactcctacaccggagaccaagtaagattccatctttttgtctatctatccatgtagaaacctaacggaagagcttgcttgtattgtcaaaaaaataaatatgtttgaaatgaattgtttcagaggcttctagatgcatcacacagggacctaaggcgtgcaagagccgcagcactgaacatagtgcctaccagcacaggagcagccaaggcggtgtcattagtgttgccgcagctgaagggtaaacttaacggcattgcactccgtgtgccaacaccaaacgtctcagtggttgaccttgttataaacgttgagaagaaaggtttgacagcagaggatgtgaacgaggcctttagaaaagccgctaatggaccgatgaaaggcattttagacgtttgcgatgcgcctcttgtctctgttgacttcaggtgctctgatgtctctaccaccattgactcgtccctcactatggttatgggtgatgatatggtcaaggtggttgcttggtatgataacgagtggggttacaggtgagagagatataacaca

SEQ ID NO: 27239 - DNA, 519 bp, Arabidopsis thaliana
tatgtaatataaaaagtattgtatctttctttagtgtcaaatgcattcccaaaccagagttgtgtattaagcagaggatgtaatatgtttgaatcaagtttattactataaattatagagcacaaatacataataaactcaggaactacaattatacattccgaatcatgtaacagtaaaaaataatggagcagacatcaagaggttgttgagtcttcacttccagttattggcaacaatgtcagccaaatcaacgactctctgtgagtaaccccattcattgtcataccaagcaatcactttaaccatatcatctcccataaccattgtgagggaagaatcaatagtggaggatacatcagagcacctgaagtcaacagagacaagaggctcatcacagacgtcaaggatacctttaagctctttctcagctgcatctctgaaagcagcattgacttcttcagcaaaagttttcttggagacttgcacgactaagtcaaccactgaaacgtttggagt

SEQ ID NO: 27240 - DNA, 416 bp, Arabidopsis thaliana columbia
tgtacctctcaagagttccatctgcataaaacttcacagtgaatatccatttacaacccacaactttcttccctggtggcaacacagtaatctcccaagtatttgtactttccattgctccaatctccttatcaatagccccacacaattctttcgaattctttgcctcagagtaagattgagggattggaatttgagtaatgctattaatgtatagcaaacgtgatggagagagtttgaaatatgaaagagaagaggaaatgggatgttgggtgacatcattgtcaagagagtaacaatgataatcatttaaatgagcaggtggttttcgtgctctatgagaagaaatttgtgttgatggagaaatttgaggtgatggaagatgaggaatgatcgaattacctgagggcaaagaa

SEQ ID NO: 27241 - DNA, 554 bp, Arabidopsis thaliana
ttattattactacagctgaaggtttagggatcaagaagattttaccagcttatcgtaagttgttcaattctccaagtgaccttagaactggtgtttgcttcgcatcaggtggtgcaggagttgaccctgttacatccaaattgctggtgaaaataataattataaatttgttatttctttaaaaaaatatattatatgtcttaactaaatatacattttctaataaatattgtaatttattttgggtggtgatttggtcagagagttttaacgccaaaggatcaagtaaacgatttcaaagggtacataagaaagctaaaggccacagcaggtccttcaagagcaagtagtatagtttcaaatgcagtgattcttgtttctcaaggaaataatgatattggaatctcatattttggaactccaactgctgctttccgaggattaactcccaatagatataccactaaactagctggttggaacaaacagtttatgaaagtaatacataaaatcattttcttatcaagcatccatatatatatatgaagtatata

SEQ ID NO: 27242 - DNA, 520 bp, Arabidopsis thaliana columbia
ggagtttcgacggcaaagcacacactacgccctgaatcaacaccagcgcaggcagcaaaccgtgggggaagaagccgccattatcggtgattaaatgaaagccagtggtgttgccatccagcggctgaccactaccgaggaacactgtacccacgaccaaaaaggtcacaatggcgagcactttaataagcgcaaaccagaactccatctccgcaaaccatttcacaccgatcatattcatggtgccaacgatggtaagtgcagcgagcgcaaagacccactgcggcacgcgccaaacgcaccccagtaatgcatatacagagcgacggcggtaatatcaacaatccccgtcatcgcccagttgatgaagtacatccagccagcaacataagcggctttctcacccaaaaactcacgggcataagaaacaaaactgccactggaagggcggtgtagcacagctcacccaatgcacgcagaataaaaaacgaaaacaagccacaaattaaataaaccagtg

SEQ ID NO: 27243 - DNA, 526 bp, Arabidopsis thaliana columbia
acatcgaaagcctcaggagaagacgaagacgacatctttgcggatctttacattgtgaaatggacaggcttattcatcatgccgcttacaatcatcatagtcaaccttgttgcgatagtgattggagcttcgagaacaatatacagtgtgattccgcaatggggcaagttaatgggaggaatattctttagtttatgggtcttgactcatatgtatccgtttgctaaaggattgatgggtcgaagaggaaaggttccaacgattgtttatgtttggtccgggcttgtgtcgattaccgtctcgctgctttggatcaccattagtcctccagatgatgtttcaggcagtggaggaatctcagtgtaaatttggatcagaatgtaaaaactgaggatttttaactctatttttttttgtttgtaaaagtaattttggtttatgtaaatttatgttgaacagaccaattcttgctgtacttcgtgttagcttttgatacacacgttgtacatggacagaacaaacagtt

SEQ ID NO: 27244 - DNA, 509 bp, Arabidopsis thaliana columbia
cccatttacatattatgcataaaacatatatatagacattattaacaaattctattcgcaaaaagcgattccggtgtttgaactagacaccaaaatgcttaaaaagacaagatcaacatttcaactctgtttcattgcgtttccggagaatcgtcatcccctgaaccatagacatctctgttttccgttgcaccagtgtctaccggagagcggatgatgtgatctaagaaagccatgtcgctgtttcgttgaggaggagactcaattaaactatcttcctcatcttctccatcaaatcgactataggaagttttgcagtccatgtgcttctccatatctgatgatctcgccatggttgaagttttgaacgcagtctctagcattttggggtaacatcgtggactagactatcccgggaagcagaacttacatcctcatatggttggtgttcgaccaaataatctgataccggtttatctcttgacggtgatgtggtctcaagacggaaa

SEQ ID NO: 27245 - DNA, 421 bp, Arabidopsis thaliana columbia
gttacgacatagcaaggacgttgaaattttcccaacaaaatattgtatgcttttgttaaaaatttatgaacttaaaactgcggagttgcaacagaagatatctaccttagagtcggaaattctggctctgctgaaggttcaggcacatcattaccaggtccagcgttacgaagatttggagggtaagatgtcaaaggctgtgtttgaggaggtgtgaacacaggagctgatctctctgatctctgagggaaaacagcaccagcacgctgaaagggacatgagtcactggtggttaggcaagagtagtagaagattttctaacagaactcacaaaaggatctaagaagaattcattatgagatgtaataaaatttcagtatgagacatctggacacccagaatcagaaacactactctactg

SEQ ID NO: 27246 - DNA, 598 bp, Arabidopsis thaliana columbia
cctcatagacatcaaatttgttattcaacgtccgctgaataagttcattgaccagatgttaaagaacagataagaattttccaacgcaaaaaacaaataatgaattgataataatcatggacacactcattaaacttaaaatgaaagttttaaatgaattaaacgtattttatgaagcgtgacctgtctttctcatcctacttcatgtgtacgctcagagtaaacaagcaagattacacgtgataagtgatgatctttttgtgtgtgtcgcaagtaatgaaaaatactttatacaggtttattgatacgtattcgtacacgtaaatgcataatccctagacatcaccctcaactcttattaattaaaccaatccagtaatcaatcattgttgttcacaatcaaaaccccttattgtctctctctaaatagaaacaaaatatcatattaagacataatacaaacccacaacatgggatcatttttaggacatgttttgccaggttttgccttcgtagcacttggcttatggcacttattcaacaacataaaactcttttgtctccaccaaacacattcagttcatcaacatggttccaa

SEQ ID NO: 27247 - DNA, 453 bp, Arabidopsis thaliana columbia
atcttcagaatctccttctcctgttgctgcctctcaaaccatgtgtctgcatctgcccaaactgaaacaaaccaacaacaccaataagtcccatttgttaaacaacgagacaacctctcagcttaatcatatatacaatcgagaagcaaatacaaacttgacctaacttcaaatccgcaaatctaacaacactaattgcagaatcaataataaatcacaaagaacactaattgcaaaccctaatttcataaacccccaaatcaacattatcaatagctcaaatttcagaaatcaaaaggagaagagaaacagtaattggaaacgtacgtggatgagcagcccaaccctgttcaccacccttaattttctcagggagagcataattaacagtgagaacacgaccataaagctcagcaccgtccatattatccatagcagcagaagcgtcttctc

SEQ ID NO: 27248 - DNA, 590 bp, Arabidopsis thaliana
aacattattagaatcaaagtaaaaaatgccaagtccattgtcgtgttttaggttttaggcttacatttcatcggttagggcttctttggacaaagctccaggcttgtcgattttgttcccaaggactaggagagggataccattaagcgacgtcttgctcaacaaatcatggagttcactcttcgagacactgaggttatcaggatcagcagcatcaactacatacctgaaagcagaatcagagtcagagagttttaatcatctgaaacctaaataaagatagtacgaaaactaatttcaagagagatttacacaatcgcggaaacagaacggcagtaacgttcccacatgctgcggaacctaggttgaccaccgagatcccaaagcttgatcgtgacacttccttttgtcactttcctcatgttgaaaccaacctaagaaagagtaaacatcctttttacgattagtccaagagcaagcaaatacttcgccacctaaaagtagtataacacaccgtagggatcatgtcttcactgtatccacggtctggacaaggaaatgcaaaggaagcgatcacgagtcatttagag

SEQ ID NO: 27249 - DNA, 200 bp, Arabidopsis thaliana columbia
  unsure (1)..(200): unsure at all n locations
nnnnnnnnnnnnnnnnnnnnnnnnctaaagtaggctggagccgaggaagaaaaacaagttcgagtggaagtgagttgagagcttattagatccataacgatgctctaaacgtgtagcccgttaaccagcaggtgtgtttttgtgagggacttccgtggtcaggtaagactttgcttgcgtaggcattctcggttgaagca

SEQ ID NO: 27250 - DNA, 1043 bp, Arabidopsis thaliana
acacataataactactataacaaacgaataggtccctgcgtcgttaggacacttttgagctaattagttgctaatctaaatcatataagagcatagttaagaaagtcataccacatgatacaaatcccgcagctcagaaagtgataaatccgatcccagctttacattcccaataaacgaacaacgctcgtgttgtgcgacacgtgagaactgattaatggcaatctgttgtagaaagcattgtggttgacattaaatcaatggagaaaatcctagtctttctctaaacaagattaagctaaggagtggtaccttagtttcaggatgatcaggggcaacaccagaccgaacaagtccaaaaggtgtaggtaatcgatcgattatatctacatgcgctccttcatgcgccttcaatacctgattaccagccatcaaatcacgagctaagagtcataattgatgatataaatcacaaaatctggtttacatacactatattttgcagaatatgagagaaagacgtgtgtaccttgtcagcagtatagaaaccagcaggtccacttccgacgatgcaaacgtgtaaaggacgggaagaagcagaagagaagtatctagacaccatatatcttgctagatatctactcattttcaccaatttcaaagaccagggcttgttttgaaagtgtagcaaactgtgaaagtgcgtggatccctcgaaattgtggtttctatgacaaacgaatttgggttctttcacttaattactcctaagacgatggagttagagatcaacacaaaactgttaatgagattgtctatgattgattttgggaggctttatgagagaaggaatcgtagcgatagatttgagaaaaagtgtaagtagtaatcagacaacgtattttttttactgtgtaaggaggaagataaagatgagaattgagaagatatcacacaattgctggggataaatcgggaaaattgaatttagggtttatgaacgaatttgggaacatctaagctcactctgcagttcacgttga

SEQ ID NO: 27251 - DNA, 556 bp, Arabidopsis thaliana
tattttgcacatgttttaaagctcagaaagaaacaaacctgcagatacaattaatgagtctgtaattaggatcaccattctgctgcacaggaatcttgcacttgggacaacttttggtgtttgtatggatccaagaaatgcttcttgactgatccaacaggtacgtccaccaaattgatgcctttttgcaagacaccggacggtgtgactcgagcccgcatgtccaacagaaggtatggccgcacaaacagaccacactgatgacattatcttcattaccatcctcctgaagctcgacggcgtattcacaacccgaagcaggacaccatttgatcgttgccttgtggcactccatgaaggattcgagaatataattctcgtacatctccttcactggctctgtgagttgctcgatcgtatcgggtccaacagaggcgacacagtcttggctaaggcaagagatgagtcctctctgctccttgttcttcttcagagcatcgctgagatattcactccagcaagttgttgaaacttgtgtgagcaaaagggcgtggag

SEQ ID NO: 27252 - DNA, 254 bp, Arabidopsis thaliana columbia
tacctttgcagctatggtacggaaagtaactcgctgatcttccttaggcgcactgttaatatagtaaaattagcacttgaatcaaagaagccaaatgagtcaataaaccaagtataaccaaatctacctagtcttcccaccatcaccatcttcaccttcaggttccttaaagatttcgcttcgtactttattcaacaaagcataatccaaacccttaactaaatgggtatgttcaacatcacctaacccatttc

SEQ ID NO: 27253 - DNA, 1429 bp, Arabidopsis thaliana
tccactccatagttcagacttcacacgcacgaaaggagatctgtgggatgcagcagaacggctctgttctaagtgaacagactatctctaaagctgggacactcccattagcaacaaggcacaggtagtatgaaatcaccactgagagtgatagacatatcttactgtgtatatgactcttttaagtgtttgctaatttggttattgttgctcactcagcctgcggcttcgagggagagctttgcggtacatggtggagctgttaaggaagccgagacagtcaactgtagccaagcctcacaggacagacgtggcaggaaaaccagcatggtatcttacactaaaccatataaactctctctacgtttttcaactttttagttatttgctgaaagaaactgacatggttcttgtgattgttattcctacaggtgagggagcctattctgcagtactccaagcgtcagaaatctcaagctaattgaagacaccacctctatcagacaccataaccaccttcttcagtggtgatgatattaacctgaaacactcgctttttattgctttatttctcctctgcattcagactattttcatactccatgcttgttattatctctcttaaagtatcatatcttatcgcacttttgggaagataatttattgcatatcaaactttaacacttattagttattactgtgagtattattcactaatgctctacatgcttttatggaacaagtatgaagtataggactatcttcgttttaaattcccctgtcgatcactttaatccaaaaactttaactttagatactaacacgtgttgaaacgtgtactacgccattccacgcgtcaggaaatcgagcaccgccgaattcatctcgccggagcatcaccgccttcgatcagtcaccgccgatccgtctagtagtgatggatagccttctccttgttgtcgatctcgaatccaaatccaataaacgtcgaagatctgccggatagaacaaagaagctgcttcaaatatctccaagaaacaccagcgccagggaagcttcatctataacgacacccatattggtgaagtcgattctttgctcttcctgagcaaaaggaattgatgaagatattattccttgaacacaacggtgaaaactaagaggatttgtgaagaaaacggcgacatcgacagaaaacatggatggagatctgaaccagacagagccggttacaaaagctgacctaaagtcagattattcgaattcgccgtagcgaaatttacagattccgattaacggaaaacaaaagaaaaaccaaatactaatctccgatggagatcggagaacggaggttctctctctctgaagagtacgagaggggtaaactgggccgcttatttcgcatgtacgttattgggcttctctttg

SEQ ID NO: 27254 - DNA, 462 bp, Arabidopsis thaliana columbia
ctcaatccgacattctccatcatgcttctcaccttctccatatctttccatcgtcctaaagccgcatagatgtttgccaacaacacatagttgcccgtgttctctggttccagctcgaacaacttgtttgctgccatttctccaagctgtgcattctcatttgtgagacaagcagcaagcaacgcaccccaaacgggtgacgttggttcaaatggaattgttgtgatgagattgtaagcttcgtctaaccgacctgcgcgaccaaggagatcaacaatgcaagtgtaatggtttgatctggctaacgttttgtaatgttcaagcatgaacctgaataatgtcaagccttcttcaaccaaacccgaatgactgcaagcattcgaggcagatgtaaatgtgatttcgtttggcgttacaccagatcgaaccatttccatgataacttgcaacgcattatgacca

SEQ ID NO: 27255 - DNA, 495 bp, Arabidopsis thaliana columbia
cagcagcagcaacatcatccaaccagctctttgctaatggcttgccaccattagctcctggtttgagaagacaccggagaccgatagagcctgcaagagtggctaaagatgacttctttaaaatcaaactgcctaaaatcgcagagagacctgaatggtggtggaggacgttagcttgtgttccttatttgatatccctccaaatatctgatgttggtttctatgtccaaccttttctcgaaaagcacgacgctattggggacatgatatatttcatcccgggagcgataaacagatggccgacatggttcttcatggtgtactgctacttgggttatatgtgggtggtgaagaacaaagagctgcctcattacttgaggtttcacatgatgatgggtatgcttcttgaaacagctcttcaggtcatatggtgcactagcaatttcttcccgctgattcatttcaaaggacggttcggaatgtattattggatgg

SEQ ID NO: 27256 - DNA, 525 bp, Arabidopsis thaliana columbia
gaatgatcatggagagcttcggactcgataaatacatcgatgaacatcttcactcaacgaattacctcctgcgagtaatgaagtacaaaggacctgatacagaggaaacaaaagtggggctaaacgctcatactgataaaaacatagtcactatactttaccagaaccatgttgagggtctagaggtgcagaccaaagacaagaactggatcaaagtgaagccaacacaagactctttcaccgtcatgattggagattctctctatgtaagccatttgtttatacttccttcaaatacagaatcaattcctgaaaaagcaagatcaacccaaatgttttgatgtcacaggcattgctaaatggtcgactacactctccttatcaccgtgtcatgatgacgggaacagagacaagatactccctcggattattctcgataccaaaagcaggacacattgtgagttcccagatgaactcgttgacgaagagcatcctcgactatttaagccctttgaccatgtcgaa

SEQ ID NO: 27257 - DNA, 391 bp, Arabidopsis thaliana columbia
acttgattgatctaaactttgaaacgttatgaatctgcaatatgtgaaggatgcaagaagctgatgggagttgtccaatatgtcgaaggaaaatgaagaaagtgaagcgaatctatacagtgtaagatgaatcaaatataaatctctgacataatgttgaatctatagagcattaataaaagttatattggtattgccaaggctcatttctttctttgcataactatttcatttcgtccctgaccatctttgtgataacactcattgtttgtcgactcacattccgaaatgggatcgaaaccctgaaccggtaagtccagtgttggtgcgtggactaaatgagttggtacttcttgatgactttggaatatgcgtaaaggtgggattgcaa

SEQ ID NO: 27258 - DNA, 586 bp, Arabidopsis thaliana columbia
gcttctccttcgtcgttttaccattcgccacacaccacgtctgtcccacgagcgacggtttcaccggaacaaccttctctttgttatcgttgaccggcgttgacttaccgttgagcgaaacgtcatacactttgttctcgtttgggtaaaacaacccgtagtttctctcagaagtcggacccgttttctgattctcgttaaacagagcgaacagataaacgtttagtggctccttcggttttaacggcgttccgtttcccgtcaacactcttttaactaacccgccgttatacgccgccgcgttagtcgaaccagcaccaatctcgttctcgtctccggcagaaggccagcctgtctctgtcaccacaagcttaacgtcgttaaatccaacggcggacattgcggcgaaaacggcgtcgatctgagcgtctaagagactgttatacttcaaaccgttaccggaatcaacattcccggcgttctccttaaacaacgcgtaatccaacgagatcttatcggcgttagtgcagtacgaaagaaaggataagcattcacataagatgcgacgacgttttgcggaggagat

SEQ ID NO: 27259 - DNA, 317 bp, Arabidopsis thaliana columbia
ccaagaacaaagcaattccgttgagcgtgtaagcctttgagcctttttgaccactattatccaagtacctgccattaatccatttgatgttaagactagcagcaacaacagaaatttgtgaagggactttcttaatccgaaaaagcttaccaccgtagattaacaaacggggttgtagcctctgataagagaactaagaagatgtagaactgactttgcccacttgtgacagaaagaatgatggcaaacatcgataagaagtgatgaaaaaccttaagtaggtaacaaaagaaaacacaattagcttataccaatcc

SEQ ID NO: 27260 - DNA, 893 bp, Arabidopsis thaliana
taaaccgatggcaaagaaatattgtttgtccacgacttttggcacgtttgccggaaatgtagaacttgccaaacttctaaacatctttgtgaaatttgcggcgtactagtgctattgatgggagggagagatggtttaatgatagaaagattcttagaagacttggtatgatgttggtattggagaattcccgcgacggttgtattatcaattgttccttggcccgtgaagtacggtcttgccaacatgtagaaggttgcatttggataaataggtttggttttgagtagtacattggtggtttggcccgggccgagaagcacgatgttggtttgaaatggtttaacgtagcaagcatccgcttctacgaccgtcaatgtatgattggctatggtgaagaagagttcgtcattgagtgcagcattgattaatcgtagtagatacgtctttccaggtttcaccatcagtttgtatgtgtctaaaaaatatgtgcattgtgtgttacaaaaacttgaattggcgtcttattttaaaattaatcacatatagaaaagtgatcatttaccttttgtagagcaattgtataatggacctgggagcccattaaaagtatgagcatcagatgcatttggacctgcacccgtctgaagagcttgttgcaccactgcttgaggatcagcattaaaccactcacctatgcacaactcaaaaacattagttgttcaatcatttaatcaaaacactgttctaaaaaaacttataaaaaaaaaattatatatatatattgaacatgcacattgacgaactaattagccatttagacgtctatttaaacaagttttttgattttttttgttgacaacttctaatcgatttgaatttgataaagatta

SEQ ID NO: 27261 - DNA, 509 bp, Arabidopsis thaliana columbia
gggtacgagctcggatgtgcaatagggcatattcctgttggcagtccctggcttgcaatttcttcaccaacagaaattacagcggcttttgcagcagccaatgaggaatacatatacgatgcaccgagcgagaggaaaggtgttgagtatcctagacttagatatcctgcatcaaacatggaaaattacatctcatcttgttctgcacagaaacatgtcctgatcatcagaattataacatgagcttacgctgtccaagtccgtgtaagaagtcaacaagaccagctctgcctgcatatttaccaaacgccaataatcgtttcccatgatccccaacaatgagctcataatcacacaaagtcactctctcagaaagaatctgcaattggataccccttttgtcaacattcctcagtatcttagataggactaaaaggataaatgaaaagtgtaatactttatccaacaaaggcatgttctctttctgtgccttatgagtatgtgaaaag

SEQ ID NO: 27262 - DNA, 865 bp, Arabidopsis thaliana
catatccaaaaagaggcggttgagggaacaaaacaaccaatgtcttaccaggcacatgtgacaagaaagttgaggcagagtcatctccacgcaaaatggaatcaaactcttcctcacagtgagctgccaagaatccaattatatcccaaacgtatgacctcagactaggtaaaaaattggcattcagtaccttctcagcaactaaaacttcttcttccagagatacataaccatccaaggattgactatgaaagttctccacaacaagactaagaagcgcttcagagatccgatacttccagaaataaatatgatgttgtccttcccaacgagtgattagagccagtttacaagcctccacaagcaaagacatctggtcaagttcaagctttcctgagctcaagaaccacttacccatggtccgaacggtagcctttactagggactcagaacacatgtttatcatcttcaagcactctcggttacctgtctgagcaacggctactgattagaaatccaaaaatatagttaaaataaaggtcaacagggcgaggtgctattaccgcaagcctttgtgctagctttaacccttcaattcgagcattttgagagcttgactcctccatgcagctaatcatcatatctaacataggcttcccattgtctaaaagctcattggcaccatggccacaaagagctgaacagaaaaacagagaaacacccaagggacaagataaggccaatttagttggcagctcagtagagaacataatatctaagtttgataagcatatatgtacctagagaagaatagagcttcaaagttgcaactgtcaaacccatatcaggcttctgactaacactc

SEQ ID NO: 27263 - DNA, 785 bp, Arabidopsis thaliana
ctataaaatttcctctcttggaacgagtttcttggataatcgaggaggaggagagagacgtaattcgactaagtgttatgctgctcagaagaagctcagcggtgttggttcttctgttgttattctgagctcacaaggagacccaccggatctatggcagcctcctggtgatggagtttccgttagggttaatgggtccagtgttaatctcggtcgtggtggtggtggtggtggaagtagtcctggtggtcctggtaacggaacagggtcgaattcgaaagaagattgttggggtggatccaatcttgggtctgattttccgacaccaaaggagatatgtaagggtttgaacaagttcgtgattggtcaggaaagagccaaaaaggtgaaatgattatactttgatgttgttactacttagttgaatgctaaatttcatctctgaatattcgtgaattatacatgcttctaatttggtttagacatgggaaatatatttagcttttaacacattcttgtgtcattttgtggttgcaggtactttcagtggcagtttacaatcactacaagaggatatatcacgaatcatcacagaaacggttagttcacttcttatttattttgcttgcacatgcatttgcatctgtttgtttctttgtaatttcatgtatccggtaagagattgttagttatgatgctggtactttttgggaagctaggtctgcgggagaacagatacactgcagcgaaatagcagatgatgatatggtagactagaggagagt

SEQ ID NO: 27264 - DNA, 1122 bp, Arabidopsis thaliana
tttcatcgataactatgaagggagtggaagcggaagtggtgatgttctcccaggtatgcagataaacacattgttaatgaattccactgatgtacagcacaagaatcttaccaaacttcagaacataatgtcaacttaccatggatatccactcgagctcgagttactcataacgttagctgctatccatccttggtgtggtcaaaaccacaacctgttgcgccaaattcttcaaccctcaggagcttttagagattgagaagctcaagcacgatgcaaagaaaggatcaaaagtcatgtttgtgcttaatcttgtgttccgggtggtcaagagggagaaaatcctcatattttgtcacaacattgcgccgatccgcctgtttcttgagctgttcgagaatgtattcaggtggaagagaggccgagagctcctgaccttgacaggggatctcgagctgtttgaaagaggcagagtaatagacaaatttgaagagccaggaggccagtcccgtgttctgctggcttcgattacagcctgtgcagaaggcatcagtctaaccgctgcttcacgggtgatcatgcttgattcagagtggaatccttctaagacaaagcaagcaatcgcacgtgcattcagaccgggacagcagaaagtggtgtacgtttaccagctcttgtcgagaggaacacttgaagaagacaaatacaggaggacgacctggaaagaatgggtctccagtatgattttcagtgaagaatttgtggaggacccatctcaatggcaagctgagaagattgaggacgatgttcttagagaaatcgtggaggaagacaaagtcaaatccttccatatgatcatgaagaacgagaaagcttcaacaggtggctgattgctgaatttttccagttcaagtttctgtttcaccatgcctttgatgatgattctttaacagcttgttgtattgtaatataaactaatcctgtatcataagtttgtgtaatcattcagctatagcatcataatatttaataaagtgaaacagatgtattcatcataatcttgttaaataaaacaaaacctccaaataagatcattaaacagttgatttgaggaacgggttt

SEQ ID NO: 27265 - DNA, 493 bp, Arabidopsis thaliana columbia
taatccaccacataatattaatcatctagggttcctctaaccaaccaagaaaaaaaggaagaagaaaggtttattctagggtttgtatcgtcaacttctgatcaatattgtcatatacaatggagaaacctggtggcttctggatccccaagaaaagcaacaaagagtcatcttgggaagagctggcctttgcagaagacgatgccgccggatctttgtggccgccaagatcttatacgtgtagcttctgccggagagaatttaaatcggctcaagcctcggtggccatatgaacgttcaccgaagagacagagcacggcttaagcaagccgacgaccaatacttattccccaaatcttcttcgtctccagagtatccatctcataaagatagcgataatattcatgaaacctcttgctatactttggtttttaacaccaaacctaattatagtaagactcaacactcttgtgttatggatctttcttcggcg

SEQ ID NO: 27266 - DNA, 845 bp, Arabidopsis thaliana
caatagaagtgagatcattggcttttgaggatccggcattgttgctgggcaccgagagaattccaaaggcgagaagaatcaaaatcacgaaagtggacatgatcaatacggcgaagacgagcgttgaatgcgaggatttccgagctgaaggacgatgattcctcggtctcgccatcatttttgcaacaaggatgagatccggccgagcgagattcgaaagaagcagagcagcagcaacaatggagtttattttcttactcgtggtgtctggtagattgactaatcaaaggacgaacgggaagtcaggcccatatgtttaagtaaggcccattagaaagtgaggcccattgaaattgtcggatactacatcagaggccggcgaggaggagaggagaaagctccgttattcaagattattccgataatgcagtcactctccaccccacacaccatctctcttcttctccccagaacctctccgtctcgtctttctccctctcttcactcccttgctttccccactcgattacggtctctttcctattcttctcaaacgtcgatcctccccgatgccggcgatgatttcattgtcggtgactgtctcgtctacgaggacggcgtcttcgaagacccttaccttgataaggaggtcactcaggttgcgaagcaggagcgcaagaagaatcggcgtggcggggctaagagattagatgaatccgagattgagcccgagaacctcgtgccagaggaatggagggatattcaggcggaggtgaatctgacgaagaaggacaagcgcaaaatagcgcaggagatggagttcggggttcgggtggagaagaaga

SEQ ID NO: 27267 - DNA, 569 bp, Arabidopsis thaliana
aatttacgacatgaagtatccagacgtatcactcatttaggcagcttattaacatttgatcgacaactatcatgagttcgagacctaatttttttgtacaactctataaaattttaattctaacacttaaaacgatgttgttataaactcttgaccaaacctagatatgaaaatacgtttttcccctgatttgatgttagccccacgaaactcatgacccgaacctagatagtttgcttgtcttcaagcaaacgctgtccagatcaaccaagtgaagggacttattttcttttttccaatgattcggaattcaagacccactacactattgggtcttcatataataaaaggcccaataaaagtctccagaggaaacaaaactaatcgaaacgacgaaacagttaaggtaacaaagtaaacaaacacgattcccaaaacacgaagaaagataaagcaaagagaaaaaaagaaagatgaagaatgtgaatggagtcttcttctgcaaatcactatctctcgtcttcctcgttccttctttcactcgttctcatatccgatttacttactcc

SEQ ID NO: 27268 - DNA, 493 bp, Arabidopsis thaliana
gatctaaaacataaaaatgcagaaattaaatgtcacctgcaatgccttttctgcttctctttctatccatagaatcgcatgatccgatgttgcattcgatgataatactatatgctcaaatctaccatcaacgggaatcgcggttctcacttcgggaggaaaccttccacatctaaatacaaaaaataatcagaggaaaaacaaacaaaaattgctaagaaatgccacactaacttcattattacctgcaaaatttccgctcaacgatatgatgaattcgaccaggagcataaagccttctaggatctcttagtttccgaccttccggtataaatgtatccctcagacaaactagaaacaacaagcacggcaagctgtccgaacaacgaatacaaaatgttgaactatacctataacaaattcattccaacaagagcattttcgaagttcgacacttaccagaatacagacttgaatatatcctctaatggtg

SEQ ID NO: 27269 - DNA, 426 bp, Arabidopsis thaliana columbia
tgtgaaattgtttagagtcttgaaggcattcctccagcgacaaccaaagtttctccagtgatgtaagaagaatcatctgatgctaagaaagcagccgcagcagccatgtctcccgttgttcccaacctgttaagcagagtcttctcttcaataccttccctctgagtatattcacaagtggttcaattattatcattccatcacttgagatacaatcataacctcagttttaacagtttcaatcttataacattaccacttcagagctaccggtgatgaaagaagcaaagtgtgtgggcacaaaaccgggtgcaactgcgttcacacgtgtatcgggggccatctcagcagcaagcgcctgaaacacatgataaataatctcataaccatcatcatcataactattcaatcatgagatggggacaa

SEQ ID NO: 27270 - DNA, 540 bp, Arabidopsis thaliana columbia
aaactcaccggtgcaattcgaaactcaaggttagggttagcattaggaggcgggtcgggaaccgaagccgataaaccattgaccttaccagcatccctcataagcttcttccacgaaacatacgtcgtatcccctggccgaagctccaccttgagtaatttccgatcaccggccgttaaaaccttcggcgacgctctcaacaattcgccgccaatagaaccaccactcatctcattaacttccgacattaataattcgggtcgggtcgggtcggatcagtttgatccactatatactaacccctgggttcgagacggattgatctaaacagcaatcaagagagtggaatcgatgaatcgatgtagagaaactgaaactgagaagaaaaagttgcgcgggataccaaaaatgacgctcttaattatttcctaatttatttttgttgttttattcactaaaaaggattattattatattatatagttatcatttttaatttaattgtatttacctcgaaatatctaaccacagatagataga

SEQ ID NO: 27271 - DNA, 561 bp, Arabidopsis thaliana columbia
ttgtgccgcagctgttcctgccaagaaatggcttacccttaacggtaagcatccttttacagagtatgcccatattgcatactaccatgtttttttttttgttgttgtttaatgttaagacttaagataccatgttgtttgtttgtttctaagaatccgtacctgtcttttgtcttccaggacaagagcctgccgttgtggccagagggggcttctcgggtcttttccctgagtcaagcatctctgcaaacgacttggctattggcaccagctcgcctggcttcacaatgttgtgcaaccttcagatgactaaggacggtgtgggcctttgcttgtcagatatcagacttgacaatgcaaccaccatctcctcggtcttccccaaagcccagaagacctacaaggtcaacggtcaggacctcaagggctggtttgtcattgattacgatgccgacaccatattcaacaaagtcactcgtatgtcttcttctctttcatttcctcccttcaatgctcaccaccaccaccacacattttcatgttttgtattattgagcagtg

SEQ ID NO: 27272 - DNA, 375 bp, Arabidopsis thaliana columbia
ctgttgtatgtaattcgcttccttctggaaatgcaaacgttttctctactcttaacttttatttaattccaattactaaagtaatttaactacatagtttgagcttctatgctcttgcatgatatgatatgtggtctatacttatcttgttatcttaaattgacctctcagtatgttatattaacagagttttacatcatcatgggaagagtctccttagagccctcaatgtcgctgcttttgcagtctctggttatgcttccaccgtatgacgacactgtaaatctttcatgcctttgctcggagaaacatatgaagctgactttcctggagagggaattcgtttctgcgctgagaatgtaatatcgtatatac

SEQ ID NO: 27273 - DNA, 520 bp, Arabidopsis thaliana columbia
cgatgttcttattttcatacctacttgtcatctttattggaggatgcatcattttgtcaaactacatcattaaatatagcctaaccattaagccaccctaccatatcttatacaaattctaatcaattggactaaatttgcttaccctttaatcttctccaagtactccggtggacgctctcgacgaactctattgataaaaataccgtaaagatcttcagcaggaccatctgaacatcatagaaaacaaactaagcacaactctatttcactaatctccacacaattcaattcttctgtgaccaaaacatagctccacacattgaaggtcatcaagatcaaaactaagcacagttctattactaatctccacacaaaacctttcaatttcaagtcaattctgaatattcaatttcacttgttagctacttacagtgatcagccatatcgaaagtagagagaccagcatcggcgtaacgaagcattgaatcaacggcgtcgtttcgatcaatcttcccca

SEQ ID NO: 27274 - DNA, 510 bp, Arabidopsis thaliana columbia
aacttttaaaaattatgattgaataacaacatattttacatgacacttttaagtcacaaaaactcttttaaaatcataaaccaataacatcctctaagtttagaatttttaaaggatttttaaaagcatcctttttttagtacaaaaaaataaacataccatttataatagttttaaaagaaaaaatgggtacgagtgcatgaatcatgcttttctcctccacccatttggactaggcatgaacccaatcctatgaatatgattttggtgtgtgttaatttaatagatatattacaaaatttaattataattacatgaataatgataatgaatgtggggcatcattgcatgaataagccctaacatcggtgatatcgaccatcaacgctgtagaaagtggtacaaggctggagtccgttttgtgatctgttcactaattatccgtccagaagaccttgtaactgtaatagcaacatggcgttttttgcagctgagaatgcactcatatga

SEQ ID NO: 27275 - DNA, 314 bp, Arabidopsis thaliana columbia
agtttattattcttgctatgtgctcaacctatgcattgatttgttgaaggtggtggctgatccaagcttgacgaagcgggagtgtattggagctggaacaagagctcggcgtcatttgagaatcagctgtctcaagaagctagcggtgtcgagaaggctcgtagagtttgggaagtcagcgacaagctcgtaggcttggcctaaaatttgatatgagatcttgccgcggtgtttcaacctcaggtttggcttaggatgagagtcaaacaccaaaggagacatcaatagagcgtgtaacaactttgatttagtag

SEQ ID NO: 27276 - DNA, 758 bp, Arabidopsis thaliana
tgctcactaagaaacaagaaatggtgaattttcatgtccccaaatatttattacaagacaaataattcaatgtctaatgttttgaccagagacatagttctttttagttaagtctatgaatccaaatctttgagtattgtacactcttttggactagttctagatatgttgatactaatggtttagttgaaatcaatatattttttgtaggttcatatattggagtaaacatagggactgatctttctgatatgccacatccaacacaagttgttgctctactaaaagctcaagaaatccgacatattcgattatacaacgctgatcccgggttgttgattgctctagcaaacactggtatcaaagttataatctccattcctaatgaccagcttcttggtataggtcaatccaattcaaccgcagcgaattgggttaaacgcaatgtcattgcacattaccctgcaacgatgataaccgcggtttctgttggctctgaggtgctaaccagtctctctaatgcagcacctgttctagtcagtgctataaagaacgttcatgctgctttactctcggcgaatcttgacaagttgataaaagtttctactcctttatcaacttccttgattcttgatccttttcgtccatcgcaagcgttctttaaccgttctttgaatgcggttatagttcgttactaagcttcttgcagtcaacaaactcatacgtgatgggtgatgtgtatcatacattgactatat

SEQ ID NO: 27277 - DNA, 430 bp, Arabidopsis thaliana columbia
caatgagatttggttttataaacaatcaagaatcttaggaatacagtaataatgtgtgaagtgaaacttacccatgagaagtgaccgccatgagacttattatcttttcctgccatgtgtgagtctagtggtgttaggttcagcatcctaggggctggtattttgtatcccattcttccgctatagcctgtttttgtcagaccattcttgtctgtgaaaagggtgcaaatgagatccaagtacgtatctgtggtgcccagtatccatttcacatcatttgaatcgtccacatgtgtaattggttaaccgagcccgtggaaaagccgttattgacattctcattgaggtctgtgagtaaagtcttatctttccgtcaagtgatcccacaacgattgtcccatctccagtagttgcatagcactggaaattt

SEQ ID NO: 27278 - DNA, 984 bp, Arabidopsis thaliana
actctctccagcgatcttcttcatcttagtttccttcattactctcctaacttctgctgcctcagcccacatccgtcgttccgcaaacctattcgccacaatcaccaaattcccactcctctttggttctaactcaatcaatctcttctttactttctcaccaattccctcatcatcttcatcgtgatggatactacaagcggagagtagagtcctccaaacaaccgcatcaggctcaaaaggcattttctttatgaagtcatacgcctcgtttagtcgacctgcacgtcccaagatatctaccattgctccgtagtgaatcatcattggtttgatcttgtgtattttctccatttcgtggaaatatttgtacccgtcatccaccaatcccgtgtggctacaagcgcataaaacaccgagaaatgttacgtagtttggtctcaccgatgattctttcatcatcttcgagaatagttgaagggcttcttctgcaaatccatattgtgctaatcctacaatcatggcactccaagtccaaacatttttgtcaaccattctttcgaaaactaacctagcatactctaatccacctgattttgcatacatgtctacaagtgcagtacctagtctacagtttaactctaactctcttaccatcacctgtgaatgcaccaatttccccaagctcaagttactgctacaagccgaaagcaaaaccaccattgtcgtctcatctggacaaaaccgcttaccaatcatctcacaaaaacactcaaacaccaaatttaacttaccattctcaacaagagcagtcataatcgagttccaagaaacaacatttctctcagtcatttcgtcgaacaccttcctggcatcagaagttttcttacaagtaccataaagatggatcaaattgttccaacatatacatcaaaatcaaacccatgtttcaaaacctcaacttgaatctgtctccagcagtga

SEQ ID NO: 27279 - DNA, 594 bp, Arabidopsis thaliana columbia
gatgaagaagaagacgatccagcaaagaaaaaaaagattctcgaagaggaaaaagcaagaattgatcgagatgagaaagcgatggatatgatcttcataaatgtcggagataaagttctgagaaacatagaacattcaaagacagccgcagaagcatgggcaactcttgataaattgtatttggtaaagactctaccaaaccgtgtttaccttcaactcaaggtttacaactatagaatgcaagattcaaaaactcttgaagagaacatagatgagtttctaaagatgatatcagatctaagtcatctttagattcaagttccagaagaagtccaagcaatcttgattctaagtgctttaccagaaggctatgatatgcttaaggaaaccttgaaatatggaagagaaggcataaaacttgatgacgttgtgagtgctgcaaaatcaaaggaactagaactaagagatggtttaggaggatcaagaccggttggtgaaggtctctatgtaaagggaaagtctcaggccaaaggaagtgataacaacaaagggaataactcaacagaaggaaagaaagtctgttggatatgtgaa

SEQ ID NO: 27280 - DNA, 515 bp, Arabidopsis thaliana
gtagcaaccaagttggttcattggagcatgtttagtgactggcggatattttgaaggatagttagtaataagtaccaaagtgtgacctccagagagagctacaatgtctctatccaatagacccatacgagagaagagagttcttaaatgtgaggcacctgcaataatccaaaaggagggcttagtcagtttgtgaaatagaattccgttgcaggagctacaagctgcaggagtaaccttcatttggatttggaagttctccatcgtccgcggaatcagcatcctggtatcatatttctcaacattagtaaactcacttagcaacgatgatttaacgcatacgctttagcggtaagtgtaactaccttacggcctggtgtaaatgggattgcagggccgccagtaacctccactgcaacaactccagcgagctgaaatgaaatgaaagaatctgtcacgctaaccatcaagggggaagagagtatttatgagtttaatggcttcgagatgctgta

SEQ ID NO: 27281 - DNA, 330 bp, Arabidopsis thaliana columbia
tacccattgtaaactttggatggtgtgacgcaataataaagcgacaggaaaagtaaacagttcaaacaatttattgataggcttcccaacaattcgataatgaaattacaaagagtaaaaaacagcatttatgtataacaacaagaagaagatacaaagttatataatcatattagtcacctcctccttgagttttgcaaggtcttcttcaggcatcactacacttacaatccttgcaaagttttgcttgggaaaaaccaaaacaacacctttgtctccgaccccatgaatcgtgtagtttacgaaatccggcttccctccgttgatctc

SEQ ID NO: 27282 - DNA, 436 bp, Arabidopsis thaliana columbia
ggaaaaagaaactaagttttgtatgatttagaggattaaggaatgtgcgaagagggttgaacaaaccaagacctgtctagtttggcattgatatcaatcacaaaagtgtcagaaattggtgtcattgcatctttagccattttctcagatagttcaagagctccagcaatgattgttgtttcatcatgtgtcaattctccacctttaccagcctgaaagaattggcatgctacgttattcggctaacaacaaaacataaaaagacattggagattattgtacaaaactcaaaatttgagatatcagagaattcgaagacatgcctcatttccatgcaaatccacaagtgttttcagctcagcgcttcggaaaagagctacacgaccatgaccaagtagaaagtctagcagctggaaatatatacagcagcaaagat

SEQ ID NO: 27283 - DNA, 566 bp, Arabidopsis thaliana columbia
  unsure (1)..(566): unsure at all n locations
tnnnnnnnnnnnnnnnnnnnnnnnntaaagtcacctgatttcggtacgtgagtccgctgaacaaatttgtcgcgttctggcctattacaaacctggaaggtgtagttgtgtacccgtaacgatccggaaggacgtccaacggtgtttgaccgtctgccaaaactgcgtggcgcacctggattgccgtgggtcgcttggacgttaatacctgtggtctgctgctgttcaccaccgatggtgaactggcaaaccgtttaatgcacccaagccgtgaagttgaacgtgaatatgccgtgcgtgtatttggtcaggttgacgacgcgaaactgcgtgatttgagtcgtggcgtgcagttggaagatggtccggcagcttttaaaaccatcaagttcagcggcggcgaagggatcaaccagtggtacaacgtgactctgaccgaagcctgtacaccgtgaagttcgtcgtctgtgggaagcggttggtgtgcaggtgagccgcctgatccgtgttcgttacggtgatatccactgccaaaacgtctgcacgcggtgcgtggacggagctgg

SEQ ID NO: 27284 - DNA, 520 bp, Arabidopsis thaliana columbia
tttttatatactgaaactttatatcactttatgcaaatgcccactatgattgtcctaaatcctaactatggtcaatagtcaaaaataaactttgtagtgtgtgacttaactaacactttcatatatttggttagaatacaaatctcctagttatctaggtttcttgttgtccccttcccatacctttcactcttttcttttacactaagaaaaatcaataaatttgaccattatgacacacattaatttctaccataatgcttcagagttttttttgggaataattaacttttgggggaataattaaatggatgcaagtaaataagagagataggtgtgggagagaaagagacctggagtctagaagagagctccttggtatgcaaaacgttggcaagcttcgagagagcatacgcacgtgtcgcatcgaattgactaatcgatcaaaaccatacagaaagatttattacattttccaaaggtcaaaagtcaaacctttttacttctcttttcccattta

SEQ ID NO: 27285 - DNA, 587 bp, Arabidopsis thaliana columbia
taagcagctgcaacccgattttaaaggcctggtagaatctaaatagcatattagagaaccaaggcggatcgatttaattaggcaagaatgctgatcctttggtttaagggtgccagaatttctaatttcaatgttgtttgcacgaggtacttgggtttttaattaggtatggctatgtactttatgttggttgtttttctatgtcagtttgtttttacagtgtttatacttggaaacatgttatagcttaagaaaagttgtttcctttttacttcccaaccttcagcgtgtcttcatcagaccttgtctcgaagtggatgggtgaaagtgagaagctagtatcaaaccttttcgagatggcccgtgaaagtgctccctcgattatttttgttgatgagatagattctttgtgtggtacacgtggagaaggaaacgagagtgaagcttcaagacgtatcaaaacagagcttctagtgcagatgtaggtgcatagcttatccgaactaaactccatgtcttttagttgtagctgaaattccggctctgacttatctcttttcttttagggtgttggaccaatgatgaga

SEQ ID NO: 27286 - DNA, 323 bp, Arabidopsis thaliana columbia
gctgaaggagatgttggttgctggctttcagccaaattccattacactagcaagcattctccctctttgtgctcggattgcaaacctgcaacatggaaaagagtttcattgctacatcctgaggcgcaagtgcttcaaggactatacaatgctgtggaactcccttgttgatgtttatgcaaaatcgggaaagattgtagctgcaaacaagtatctgatttgatgagcaaaagagacgaagtaacatacacttccttgatagatggatacggaaatcaaggtgaagggggagtagccttggccctgttcaaggagatgaccag

SEQ ID NO: 27287 - DNA, 543 bp, Arabidopsis thaliana columbia
aactagtttttggcctaagaacacatttaactatagcaaaaagtactttaatcaccccaagttccacatttgtaatgtcaagtgagaattttttaagaatcgaacatagttcctaattcctaaccctttttgtctcttgcagggtcctcttaatactactactactggtgatcatatacattgcagtggcctttctctgccacggacctactctaccatcttgcatttaagtgcatctgtctcttaaggaatccatcccgattctgcgcgttgccacgactttttatctcctcatctgattgtaaaccttgtgttttcctgagcattttcatgtggcttaaaaagcttatgtttccaactcacgtatatgaaaaagtatacttatttatagagcaatgtaaaagctcattgctttgcgaagtgtgtgaatctttgttgacatcatgttctataaattacatacatagtggaaaagtgaacaggcttgctttgtctgatatgttcatcaactctttgaatcttcatgttctttgtttatgtgac

SEQ ID NO: 27288 - DNA, 844 bp, Arabidopsis thaliana
aaaacgtaaataacaaactagttattatattctaaatttaacattacaaatacaaaatcaaataaagtgcaagcgtgctccgtttcaacctaccaccctgcgaaggttgagatacattctaattacacatatgaaggatgattacacagatgagcctaatacacatgaaagtgttacacatatgaaatctttaaagatctaagatgtttcgacaatatatatttcgaattatatacttaaatagaccaaaacattcatgacgactaatatggtggtctaggagggcgtggcccaagaagtcctggaaaccaagtagctccgggaagtggaggtggtggatcaggtctgggaggaggtggaggtggtggctgaggtcctggaggaggtggaggagggcgaggctccggaggcggtggtcttggtggcggtggatggtggaaaggaggaggatgacgatgaggaggaggataaggcattttgtgaattgttattgcaatatctgtcttgtgtactaacttagtttatatataacatcaagatgaagaatcattgttaccgacaagtctttgaagtgtaaaacagttactcattaaataagtgcttagtagaatggtagttatccacctaatccttcaagctaactttaattcttctggaaggatttcatacttatgcatgtatagagagataaatttcatacttaccaccggtttaccaaacccaatcttagtatttccagcatcaaaatacccccaaaaccaaatactaataataccatattggtaccaaactcaagcttggtactcactagaatgtgtagccgctacaaatgccatgaaaaata

SEQ ID NO: 27289 - DNA, 413 bp, Arabidopsis thaliana columbia
gctcttcttcttcttcttcctctttagactcatttcgaagaaactaaatagagggtgagccgaacccctggttttctccaccggtttattcaccttcggggattgaccatggggatttgtaggaacgctctccggtttcacttctaaaagccctgcgcctgcttcttcttcgtcgccgagcttcttgtagctgcctcgaaccttcctcgtgctcagcgctctaatcattatttcttgtggttttgatcaattctctctggtgatatgtttttaagaaaggatagattttgaaaaggacacatcttttgacttctcttctccttatcccaacgactcctttaacttaaaccttatgtgacattgccctttcacctactactattcgtgggtcaatgctactttacttttgacta

SEQ ID NO: 27290 - DNA, 581 bp, Arabidopsis thaliana columbia
tgtagaggacagagctcgaaagaagcaaagagaagtgccgcgcctgcaatcaccgatggtttaaactcgaggaaactgatatctgcagcgttttcaaacagattttagcatattgtgattatgtgattgaagaaaagcaattctgtatttaccatgttgaagactgaaagtaagatcactggtttgagatttgagggaatgttttagtagtaaaggatcttcttctttgagctcaaagagactaatgaaaaaggccaaaaaggagaaaggagtaacagagcgcatcctccatttaagagctcctagaatcacattctccattctctctatcatctgagcatcaaaaaactcaccttccacctgaaaaaaatccaatgttcagacacttatcaacactttaaaacacattcacattataaagattcatgagttttaagttaccggaagatcagaaacagacatgtctggtttcctcatttttgcagacaaagagacacaagagagagatatgagcttaagaatccagggctttgactgctgtttgcaaacaatttagtcaaactcagatgaacaaaggcaga

SEQ ID NO: 27291 - DNA, 543 bp, Arabidopsis thaliana
tggaggacataaggtcaacaagtgacaaattcacttgggtgggtgaacgccataatcatacagtgaaatgttgtttggatagagccatcatcaacacggaaggagcggctacattcccctatgcagagcttgaatttctggactttacagggtcagaccacataccattactattgactctagagaagctagaaacaccaaaaataagacctttccgctttgataaaaggtagctagaggttccggatttcaaaacgtgtgttcgtaatggttggaatgaagaaacttctaaacagagtactcaaatctttgatcaagtgcgaacctgtagaagagcaatggctactctgaaacacaagtctaatatgaactcacgtattaggattgatcatttacaagcgtcgttgagcaaagctatgtccagtgtgattcgagtagaacggttacttataccacgtatacagagcgatctcaccaaagcattttatgatgaagagaaatattggcagcaaaagagtaggaacaattggatgaaggacgggt

SEQ ID NO: 27292 - DNA, 858 bp, Arabidopsis thaliana
caaaatatcttttgagcatgtttttagattgatttatgatatctgtgttactccccaagatgagcatatcgtctacatataaacataacaaaatgtacccttttggagtaattttgaaatatatgcatttatcacattcattaatggtaaaatcattagacatcataacactgtcaaacttctcatgccactgcttaggagcctgtttgagtccgtatagtgacttcacaagtttacacactttgtgttcttgtcctgggataacaaacccttcaggttgtttcatgtagatttcctcatccaaatctccatgtaagaaagctgtttttacatccatttgatgtatttcaagatctcttaaggctgcaaagcctatgagcatcctgattgaagttattttcgttacaggagaataggtatcaaagaaatctaaaccttctttttgtcaaaatccttgtaccacaagcctagccttgtacctatcaatatcaccatttgttttccttttaatagtgaaaatccatttactccccaatggtttagaactttggggtagatttgctatctcgtaagtatgatgttgcaagatagagtctatttcagtattgactgcttccttccaataaggtgcatcgggggaagacatggcttctgaataagttcttggtacgtttccagctaaaaacgccatcaagaaatcatcaccgaaagatttctcttttcgagctcttttcgtccgcctaggttgatcttcaggttcctgttctgtttcttcaacagtaatagtacccaaagaattgtcctcagcttccgatgttgctgcaactcgttgatcacgagttcgtttttgagttttcc

SEQ ID NO: 27293 - DNA, 905 bp, Arabidopsis thaliana
tacattccttcattatctcatccatcccactgtatttctctattatcgtcttcctcctctgcagcacgcttgcactatcgcgtaaagcaacaaatcttctgtcggtggtgctcgtaaccggattctcccccatgtcgcttcgcaatcccagttcgtattgcagcttgatccgcccacattacttcccagagacacaacgtctgctcaaaggttagttctcgtctgaacagaactacaaccatacggtatacaaagaagcagtcttctgcttcaaggttctccaagtgtcggtacaagtgaatgtctttgaattttatgattttcgataccattgagagttgccgcctgattccaacctcgtctaaccggaaattatgccgtgctttactcatgaagccaacaaagcaccagaatgctaagacgtcgtcttccatcactgcgattaaaggagatagtaagtcgctcattccttgacagtaaccaatttctggatcatagactgcgtaggcttcaaggatcccgaccaggcgggctgcgtgaaatatccggcagggttccaagtggtcatagtcattgagaccaacctgaatggctattccccgggcttttgtctcagaaacagcagcttgagttggtgagtagggcacccattcgtcatttgctctcacagcatctaggcggataattctctgccaagttgacatgaaatcctcgtccgctgcctgagattttggctttgatgatggagacgaaatttctttttcttggttaacagtattgtggctttctacttcttcgttagctagaaaaggtgaagtctcggtttcttcaggattggttgagtctgaatcattaccagcagcatcttctgtggtgacatcgctcttttcacagttctcatcctg

SEQ ID NO: 27294 - DNA, 464 bp, Arabidopsis thaliana columbia
ccataattttagtcagttatatctaatgttataatgtttatataaccaggcataatatatgcaaacgagatgaaagtacctaggcttaagtcactttctgccaatctacatcgcatgggagtgacaaataccatagtttgtaactatgacggacgagaggttagtttcttgaacctttattcttctgttgacggtacatgcttgaggatgttaaatattgcaaactggttgtaaaccatcagctcaaccaaattgaaaaattactggcaagactgtaattgcaccaaataacaaagttttaaagacagcttctctattattcccttgcattttttatctatctcatcttctttgcctttcagctaaccaaagttttaggtcagagctcggatgatagagtattgctggatgctcctgcagtggaactggagtaagaaagtttggaccatacactcgtaaagtct

SEQ ID NO: 27295 - DNA, 374 bp, Arabidopsis thaliana columbia
cacatttctgcaaccaaagaaacaaataagaacagagacaatagcgtataatagctcagaacaaggctcgaaggctcacaatgttctctcctatgaaaggagattgtgcttcaagcaatagagaaatgacagccggatcagcttcactttgatggtttgatatcaacacgatattgtgtccctgtaattaaacagttgagtattaaagtcctgaatggaaagaactttaactgttgatgaaagcaaacagcattaactagagcccaagaaagagggaagatgacctgtcgaatcttgtcttccagctcagagaatatagaagcatttccaacgtacgaatttctgcataacatattcaagggttgttagtagat

SEQ ID NO: 27296 - DNA, 606 bp, Arabidopsis thaliana columbia
tgacttcaattttctcaagttttgaattttctttttctcttggggaaaaagtcaacatttttaactctaatcatgagccaaacaagcttagagccacttataatttctattataaagcttcaaattttgcaactttggttgaaattgatagctgttggttggaatttagggtctaatgatgatgaattgtacacggagctatggaaagcttgtgcagggccacttgtggaagttcctcgttatggtgaaagagttttctacttccctcaaggtcacatggaacaagtaaagaatccaaactcttaagattattccttgttttgtctttctcaagttttaagatttgaatgtttgtcttttggcagttggttgcttcgactaatcaaggagttgttgatcaagagataccagtgtttaatcttcctccaaagatactttgtcgtgttcttagtgttacgttaaaagcagaacatgagaccgatgaggtttacgctcagatcacattacaaccagaagaagatgtaagtttaaagaatcttgaattaatgtgataaattcagtgaatttgatttagattttgtgtgtattttattatgcagcaaagtg

SEQ ID NO: 27297 - DNA, 559 bp, Arabidopsis thaliana columbia
gaccaagaggattcttaacaatttgcaactaaagagcgtctttactggtgtatttgctaaagcaactgacagtttgttccaaaagcttctcaaagtgcagccttatgtcacttatgggtacgtagagacaatcaatcctctttcaatatttccttgttactcgatttccatgctgtttctctattctcgtatgagctaaccgatgtttacgattcttgaagatacccgaatgataagagtgttaaggaccttatatacaaaaagggatgcacaatcattgagggaaatcctgttcctcttaccgacaacaatataatcgaacaggtaaaatttcctactcttaaaagtataggagcttattccagataataaccatgctgttcttaatcgtttccacttttgttaccttaggctctaggagaacacaaaatcttgggcatagaagaccttgtgaatgagatagcaagagtcggagatcatttcagagaagttatgagattcttgggacccttgaaactcaacaagcctgtgcgtgatgttttgcccggaagaaacaagt

SEQ ID NO: 27298 - DNA, 581 bp, Arabidopsis thaliana columbia
ccagcttgcaataataggaggatacaaattcactaatattttagacatggcaatgctaaaatcaaccacagaatctaatgtatttctcaatgaaccagcttacagtgtggataacccaagactaatccagcaaactaatcacgtgtaccataaccgagagccaaaagaaacataggtctttgttttcgagaacccaaaaccttgcctcccaacactagtaccaaatacaaaaacactcgataccttaatcacattaagcaacgatcctatttatacacaattgattgctgatgtactagcatgctcactttaaaagaaacaggatgctggaacagaacagagagaaggaacatgatatgacaagcaagacactctcgattttatcagtctatcaggaacacacattttactaaccataaggaggctcttcagcaataattacgtcagtgtcgatgttagcatggattatatggccatcagtgctacgtcgaacagtaccctttatcccatcaagcagtgctcctatcaaagagaaccaatacaaaagatttgcaaaagatatcaacacggaaacaaaagag

SEQ ID NO: 27299 - DNA, 511 bp, Arabidopsis thaliana
tctataaacttcccatgtctgaccaaaccctgcagccaaatattgtaactctgcaagctagcgagatcatcattttctctaatcgactcaaagagggtcttggcatcttccagcaaccctaccttacagaaacctttcaacatcaagttatatgttatactattgggacgaggaagacccagatactcatctagctccatatcactgaaaattctagacgcatccaaaacctttccttctttacaaagcgctgatatcctagagttaaaagtgacaatatcaggcaccaaaccttcctcccgcatcttctccaccatcttttcagaatcatcattcctaccttctctacagaagctcgaaacaatggtgttatagataactttattaggcaaaaccccaaaactttccattgcattcaacaattcaagccctttatcagtcaaaccagctttacaatacccacgaaccaaaatcccaaaagtaaactcatttggcttacaacctttctcag

SEQ ID NO: 27300 - DNA, 805 bp, Arabidopsis thaliana
ggtacttgagtttcttcttgcaggcttgcatgccttttatagagccacacaagtgagaatctccaagaaaagactcaatagtcagcttagagaatgatcctttgtcagatacattaccagagagcaagttgaaggagaaattcaagtgcttgagagtcgaagactgttgaaaagaaggcggtatagctccggttaatctgttaaaagacacatctagctctttcagatatggaagttggcctaatgatgaaggaagcgtactggagaaaccgtttcttgaaagattcagatgctctaatgcaatgcagcttccgagctgaggcggaatcttccctgagagttcgttggaagacagatcaacggagagaaccatatccattttgcttagctccaaaggtattggaccgcttaagtggttgctagagaggttgagatacagcttcaggtttctgagattggagacaacttcaacaggtatggtccctgtgaggttgttgtgagagagatcaagaatctcaagattgatacatttgccgaggctttgagggacagtaccagagagatggtttccgtacagaagaagtcttctcagctgagaaaggtttccgaaactatcagggattgaaccagaaagattgtttctagaaacatcaagaagaccaaggcgaggaatatcccggagtccatagggatttcgccggttaggtgattattcgagagataaaccctttcgagcttgcttagcttacagagctcacgcagggataggaccggacaagaggttcatcgacaagtttagaagagt

SEQ ID NO: 27301 - DNA, 554 bp, Arabidopsis thaliana columbia
tgtttaaaatatgatccttgagatttctgctctgttttgcatattcatatatatgtttaaaacgcagtgcccgtatcctatatcgcttcgaccaagaagatcaaggctttaacgagtaatcaccacctagtttcacttgctctacgctcctcttcaaaacttgtaagctgcttctttctttactctcgacttaccaactaaatattataagatccaagtatactgagagatctttgtgaacacaattaaggttgtgagtgaagacggcaagaaagttaagcgtacaagtcaatttactgatagagacagagaggaattgcaggtaaatttgaatatcactaaagcttcattgtatttattatcaactatatatgagttcttgttactctttactgttctgcagggccggactgtcgttgcagagaatttgccagatgatcattcttaccagaaccttgagaagatctttggagttgttggaaagtaagaaggctttttactttcattttaaacattttctctacatcaataaacaacaactctggatgcaattt

SEQ ID NO: 27302 - DNA, 580 bp, Arabidopsis thaliana columbia
tgttccatcaaatagtgcattatcttgaggaataatcccaagccttgatctcaggtcatgtagacctatcttggttatatccacattatcaataactatggttccatgacttggctctacaatcctaaacaatgcctgaattaaagttgatttgccgcttcctgttcttcctactactccaatcttttttcctcctggaaacgcacaagtgatgttcttcaagacagctgggaaatgttctgcataacggacctggaacaaagaaatctcaggattgagaatcttgattacaacttgtttctgaatgtattaacatctactttgttatttacctgtaggtctctgaagacgattgatcctacatttggccagttatcaagaggtctctgatcatcaattactagaggtgcttcactggggatcttagagtgctgaagaattctttctacagaaatcatcttgttttctgcattgcatatattccatatcactgtggcttgtagaacattcagacttaagccatatgtgaccccaagaccagcaatacctgtaaggaaaagtgaaaatgaagtttgatttc

SEQ ID NO: 27303 - DNA, 995 bp, Arabidopsis thaliana
acaaatctagaagcaaaaggaagctatacatttggaacaaatcaccaattacttcttgatgtggtgatattcttttctatctattacatgattagaaatggtaattgttatggaaaaatacatgacattgtttttgattaaaagggaaacaaaaacgttgactaacgcttaaacaagtgttcctctccagatcgaggatctatgtgtttaatccaacggctaggaatcttcctcaaaccattaccaccaccactggctcccacgtgtacgatctctaatcctctcccgacgggtaagaacaccgatctcacgacacgtgtacctcgtctcaaaagaccttgccatttaaacccagggatagatttcagcgtggcgtttttacacaccaaaacggcgcccattttgctcgttttcgctaatcccaacgcgtttacgaactcgtggcgtttcgaatcaaccaccatgaaatccacgccggagattctctccaccacgtcctccgccgagtctaagaccataacctccgttgagtcactcgtaacggctcctctcatcaccgcctcgtactccgacctcgactcttcgtcaggaactatgcacacgtgtcttccacatgtgtgtatcgctgccacggcgagtccgacgctagttgcgatcggatctccacgtgaccaagtctcaacgatcagcctcgtgttccatcccgccgccgtagccgataaaaactccgccacgctcgagtctctgtagcttttacacttcaaagacacacatatagaaataattacatcaagattctaaattcatatatgtacatgatacatcaagatcgactaaataaaaaccacatatacttcacagcgaagaaaatattaattataagaactataaaaattgtaattcatatacatattgaagatttccttgatcaaaatacaatttaggtcacaagttgaatgacggtgacaaacatgacaagaaacaaaagatgatgt

SEQ ID NO: 27304 - DNA, 485 bp, Arabidopsis thaliana columbia
gatgccgtgtaaaacaagaaaacgtaaaagttgacaaaaacaaaaattgttattcgctgtttttttttccgctaataatttctatattcaagtttttctcactaaatattttacttatcacacacgtattaaaaatgttaactacaaatagagaagttggcttggaactttcacctgcatgttgcatttgatgacatcaagtggcgtaatcagcgtgtgggtgataccgcagctcagcatcccggcgaccgtacacgccgcgaaatacgccggcgagtacatttccactttttcattcggcgtcgcgatggcgaaactggtaccgttggatgagactgaagaattagtcggagaaatcaacggctgtgatttaaggtgagtactcatggtcgtctgcctgaaaaagacgatgatcggacgagtagagaaagctcgggatcagcgatctgcttgagtcagacatttcgagagaggagatgagaaat

SEQ ID NO: 27305 - DNA, 464 bp, Arabidopsis thaliana
ctagaggatcccccatccaggaaaacccggatgaagtctgcccagcaggatggaagccgggtgagaagtcaatgaaacccgacccaaaactcagcaaagagtacttctcagctatttagaaactctactatgatagcaaaaaggtacaatctttgttatatgtgagcagagttttttttcttgtacgctaaaacaatcctttgtttgattctcactttgtccccaaaattataataaaaaactttttccgttaatggaagtcttattgtgttacgcctacaaattcatattcagttgatcacttacctaagcatgtacactgtacatattaatggtaaaaatcaagaccattttgtgatcttctttgatagcacagagaagccattgttctaccatatacgctagtcatattaaaggacctgtaaaaaaaccataggacagaaattataaaactatcatttctc

SEQ ID NO: 27306 - DNA, 548 bp, Arabidopsis thaliana columbia
ccatttccttggcgtagataggcaggtagttcaaggacttgtactttagatgacttctttgttggtgcaaaatactaaaatatataataaacttacagaaaaccaaagaaagacagtggttcaagaaggttgatcaagactggaaaatacttcagaacaatctaccaggtaagaatgtcaagttgtacagttaaaacgttcagtagtatctcatgatggtaacttcttattggaaaattttgatttaactttggcagatggaatctttgttcgagcttacgaagatagaatggatctcttgagggcagtaatagtcggggcatttggaacaccataccaagatggtctcttgttttttgattttcaccttccatctgactaccctagtgtgccaccggtatgggtttctaatttttattattattatcgtgcccaaccaaatgttgaatccagctatgatatgaaaataatgttctgacatgttgcagtcggcatattatcattctggtggatggaggttaaccccaatctgtacgaagaaggcaaag

SEQ ID NO: 27307 - DNA, 624 bp, Arabidopsis thaliana columbia
  unsure (1)..(624): unsure at all n locations
nnnnnnnnnnnnnnnnnnnnnnnnnnctaaagttggtttgaacattaatcttgcgtcccgccagttctgaaagggaatcggcgagcagcgttttatcgctaagattaaaatcgagcaggatctcacccggtaaggtgcgcatctggctgccttgtaaatagaactggcctacgaaggtttctaccacctcgctcagttccgtaccgccaggcactttcgggaaatagctgcggctgccgagcactttgccctgacgaatgaacaatacgtggacacaagccatgcccgcatcgaacgccacaccaataacgtcgaggtcgtcgccggtattggaaacgaattgtttttcggtgacgcgtcgcaccgccatgaatttggtcgcgaatacgtgcagcttcttcaaactccagattctggctggcagtttccatacgactaatgagttgcgtacgacctgatcatctttgccagacaaaaacaggcgcacatactcgacctgctgagcgtattcttcttcactcaccagtccttcaacgcacggtcccagacagcgccctatctggtattgcagacacggacgcgagcgattgcgataaacactattttcgcactggcgaatgggga

SEQ ID NO: 27308 - DNA, 507 bp, Arabidopsis thaliana columbia
  unsure (1)..(507): unsure at all n locations
ctggtaattacantgaacatgtcataaacacgtgtgcatataggtcttctctggttgacagaatgccggtactggatgaggctactttcaatgtgaggagggccggctcttttcctgcatcagtttcaaccatggccaagccttcagttagccttcaaaatggtgttgagaaacttcctgtcgctcctcttgtggacttgctagacctagattctgacgatatcatggctgcacctagtccatctggtacagatttccttcaggatcttctcggtgtagacttaggttcatcgtcagcacaatatggttagttctttggcggttctacagctcttgcgttcatattatggcgtgctcatctgctatgtgtctctgaatgaacaagtttttaaaaaaatcattttcctcattgccttgcaaaaggataactcatgtttggtcttccattttttatcaatgattcaggtgcaaccaggctcaaaagctggacagatctgtgctggatat

SEQ ID NO: 27309 - DNA, 568 bp, Arabidopsis thaliana columbia
gtgtataatgaaacaagaatttgatatagaatgttcagaccaactaataaaaaaatagaatgttctgcatcaacccaataaaaaaaaagaatggaagccaaaagacgacatgcttactgtttgtgaatggaggaatgaagaatgaagattgaaggatcaacaagctcctcatagttcgtgttttgcacaaggtacaacatttcacagagttgcaagtacacgaaacctaactcgtaactagacatgaaaccaataccagcattactcgactctgtagtagacttaaaagataattaggctgtcaaatagagagaatggaaataaaaacaattcatcttacacacaaactcgaaggtagcttgaaaaatcaataagaagaagcaaaattttcatttccctatgggtaaaaaaagtacattggttaacatacaacgatataacgcatcactcgtaacatatacgagggaaagaaatctgtaagtaggattactaagattctaacctgcaagtcaagtagagacaagaagactgtacaagttcagctctgcatcctttggtgaagttttgg

SEQ ID NO: 27310 - DNA, 547 bp, Arabidopsis thaliana columbia
caaacttgcttgaaaaaagtgataagaactgagacaaagaattattgtccccagctatgagatgtttaggcaaaatctctttggatcaagaatatattaaccaattttttcctaaattgaaaaactagtgacttagtgttttgagattgagaagcaagtgagaaagaatctctttataaaaaaattatgaactcaaacgagaaggaatctgcagctggttaacgagaagtgggaaggaatctgcagcatccttcaataacgcaactttagatataggagatttggctgacctctccttgtccgatccagttcaattttgagatctaacacctctttctccaacaacaaaactctttcagaagcagtagaagatttaatcttctcattgtccagctcaagtttgagattcttgacatgttcctcgagttcttccacctgagaaccatcagaaatgtcattcttcctcgccaaggaaacctcctcaagctttttctttaaccaatctaccttgaatcctgcttctgttagctcgctcaactcgatgtga

SEQ ID NO: 27311 - DNA, 333 bp, Arabidopsis thaliana columbia
tacaaaaaaacctttgatctcttaatataatctctatttcgtttttttttgtcctttaggttttgagttgcaatgtcctcggatatgcgtgacgagcgtttcttttatcatcgatatctttccgttacaaatagaacaactccaactacggcaacaaacttgccaacatcgacatcgaacatgcgatctacgagtttgatgacaccaagggttgcacatacttcaatgtcatctggaggagattttcccgacgaccgttttttccatgctcgtcatcagtccgctacggatagagcagcttcaaatagaagcagggcgatcatgcccatatcg

SEQ ID NO: 27312 - DNA, 494 bp, Arabidopsis thaliana columbia
tcaagtgtgtataaaagagtagcattgagaaacacatctggaagaatcccactgaaattgttgtttcgtagattaagcacttccaaagaataagtgatattccttaaacatagaggaattgagccactgaagctattgttggacacatctaaaatctccagcaatctaaactggcagatccaatgtggaaatggtccttggaatgaattagaatcaagacgcaaactcgcatttgtgcttgatctagaacttgtgatgatttgccaaaaccactcaaagagttgtgagaaagttctagcgatgacaatctcaataagcaacctgggacattgccttgcaacttattgttggcaatatctaacctttcgagtttgagaaattgagatatggattctgggatttggccatcgagattgttatcagcaaggtatagtctactaagactagacgatgatggccatgtattcccaaaatctataggtccgttgaaattg

SEQ ID NO: 27313 - DNA, 587 bp, Arabidopsis thaliana columbia
atttattttcttctcaaaagcaatgtaaaccaaaccgaaatcaattttagtttaaaaacccataaaacccatcggcgctgtgacgcctccggcgaaaacaaaaaaactcggcgacggtaacaacaaaaatgggaagagggagacgacacagaggttcaacttcgaagagaaatcaaatcgaaaatagcaacgacgacaatgttcgaaaacccctcaaatccgaagcttcctttgattccaacaacttgcaaaagcccatctgctcaaatcttcattttgaggagtattacaaggtacctgtatagaatcaatgacacttgcatggatttggaaacttttcttctaatcaacattgttgcggtgtgtataaggaacaaagaatagtgaaagctcaagagtgggattcgtttatggagtttcttcgtaagccattacctgctgctttcagagtttattccaagtatgtatccttacttcatttagtatccttcaaagtataagtttttttgtttgactaagtaagtggtctctgtttatgatcttcagtggtcaattttgtgatgagattcgctgaaattggagaatga

SEQ ID NO: 27314 - DNA, 566 bp, Arabidopsis thaliana
cggagatcaggcttacctttcttaacagtagccataaccatatcaccaacacacgctgatggcaaacggttaagacgacccttgattcctttaaccgaaatgatgtaaaggttcttagctccggtgttgtcagcacagttcacagtggctgccactggaagacccagtgacatcctgaacttgttaccagaggttcctcctcttcctattcacaaaaaacaaacacaaaagttacagatctaaacactatcaaccaaagtagagacatataagactaatattcatgatccagaagctttactaatagaaattagggtaaaaccattgtcattgaaagtgaaatgaagaaaataagcgaaaacaggatatgattcatacgagatgtacacagattaggttaagcgaattagagatgaagaaacgtttttttacctcgcttcgacatggttgcagagtagcagctctctccttgaaagagtttcaatggcagcgctgagagggtttatatacgcttgaactagggtttcttcatgtattgtgagctgacctggactttattttatggg

SEQ ID NO: 27315 - DNA, 621 bp, Arabidopsis thaliana columbia
ggtaatttaaatgctaataacaagacttacttcgggtagagtcagttgatgagcgtggaggtgaaacgcttcctttgatatctgcattaacatttacaagaaactatgagaaaggtaggaggctacatgctgtaatccgcaaaagaaatgagaaaacaaacagtttttgcacctaaagaatggcgagaaccacgaacagcgtcaaagtttctgtacgtatagcccacaaaattgatattttgaggggttatgctcacctacgagcaaaaacaaaggtccggtagaacgataagtacagagcaggaccccgcgaataagcgaaatgatgatataagattttcctgagaattgtagtaccttccatgacggtccagatcctgttcttgctggttttggacactccacctaaggaaagaatccgaatatgataccactgaaaaagaactttttaatccttgagatggcggacttttacctcatcgaatttcataaaattctgggtatcaagttctccattgaccactggcttaaaagctgcatccatctcatagagtttttccattccacatctttgaccaagtatgagcctagatgtatcgtgttttgttaaaaaaagaatgt

SEQ ID NO: 27316 - DNA, 572 bp, Arabidopsis thaliana columbia
tattgcagaggtgagattctaatcttcttgtgtatacttttggaagttggctataacatcattagcatatttaccctgaataatggtaactgaagatatcctaggaagagtagagttattatactgtcaagttgtactccaaagttcgaaattattgaagaagggtgagatttagcttgaacaccactgagcaaatttctcagtgatgtttcctcgagatgtttatcatggaacactcacggcaatctgaactattttcttacctatgcaaacggatgatccgctgctcggattcaagaccatctttcggcctaatggtgctcatcgctgtcacaactacatgaagtacccaaagtatgttcttctcctcacttagcttagacatagagatccattcttttgcatatggaatctgagattgattccatctttgttgtgacagcatcatgaaactaggcgaacgtgcgattcttcactacacttactcgaaattttcagatcttactgcaagacgtgatcgatgttgctgcaaaccataagaagaggatgtcaagatatggttcatgctagac

SEQ ID NO: 27317 - DNA, 432 bp, Arabidopsis thaliana columbia
atgagcctttgctgaaattcaagtagtcctcagctcctatgtttaccatgtatatagcttctgctcgttctatatcagtccattgcttatgtaactctaaaaacttcgatatctgttgtccaaaattcatctgcaaatccaacaatattcaacacataggtttatacaactcttacgacgccatgatgttatcacaatggcgcgaacagtgcttacggatgcagtagtagattgagatcctagaacaactgctccagcaatggcacagcttgctccactgagaaagatcagctttcggatcaagtaccggagacatcggatcacgatgatcaatcaatcgacctaatagcaatgaaattggcatctattacaagaaccctcgtagatcagtgtaagacttttagtgtttaccgacgaaatctgggacaatgt

SEQ ID NO: 27318 - DNA, 606 bp, Arabidopsis thaliana columbia
tagtaacttccgccagtgtgctttagagatagtatgttacgacaccgaggttaacgttgctgctgaaccggcgttactggagcaggcgctgggaaatttactggataacgccatcgattttacccccgagagcggttgcatcacgctaagcgccgaagtggatcaggaacacgtcacgcttaaggtgctggataccggtagtggtattcctgactacgcgctttcacgtatttttgaacgctttgactctttgcctcgtgcaaatgggcaaaaaagcagcggtctggggttggcgttcgtcagtgaggtcgcccgtttgtttaacggcgaagtcacgctgcgcaacgtgcaggaaggtggcgtgctggcctcgcttcgacttcaccgtcacttcacatagcttcagattcttgccacatagtcttcgtatcctgctgccattgcaaaggagaagactatgttgagatccccctgttctggaaaatgactagcctgtttggtgcagtattgctgttgttgattccgataatgctgattcggcaggtgattgtcgaacgtgctgattacagtagcgatgtggaagatgcgattcgccaaagtaccagc

SEQ ID NO: 27319 - DNA, 712 bp, Arabidopsis thaliana
tagtaacatccgatactcctactaaagacgttatgtacaatccaattcgtaatattgcatatacaaaaaaaaaacattaagtcaacagatgaacaaaacatggacgtatcaaactcaccatgtacagacaatatgaacatgtttttgatcaatgtatagatcttttgtccaacacatctaaatgcctttttaacttcatcacttgatcaagtacttgcagtggtagaagttgctagtaacagttcatgtgcttcatttaacatccactcttcaccggtctgaccacctaatacgaccaatcgagttcctccgaccacacatgttgtgtgtccccatgcaaacctcggcggacctccctgaacattcagtattctccatgccggtttctcctcatttggatcaagaagataaagctgagaagccgagtcaagccctgcaaccgaaccaccaaagatcaagattctaccaccgggaaggctgattgccacatggtccagccttggtggtggagctgccatgcctccggggaggctagatccatacccaatcacaggtctccaactcggttcatcctcgctaagatccatcgtgtatacatcgttagagcgtgatctcaaagtaccgtttttagctagaccgccaaacataagaatcttgcggtcaccatagacagttaaagtatgcgcgagcgagatgggggagtcatggaccg

SEQ ID NO: 27320 - DNA, 673 bp, Arabidopsis thaliana
atgacggtgtcgaatccatctccggccaacgataaattttcctcatgatccttctccgccttattattatttgttgacgctatcatcactgatgcatcacacccctatgaatattaatcaattatttagaccaaataatggataattttacgcaagaaaataatatcaataaaaaatatgttttacattgacgaaacaatcatggaaatagaggcgtagagtggcgggaatggtggtgaaagtttgttggacttttttctgtacggcgtttctaacgatttgttcgacgttaggacaacttccggcgtagaagttacggcggagttgtgcggaggagaggtcgagggtgagacatagagagagaagaagcaataagagattcgttttgttcaccacaaccatttaaaaaaaaatattttcactcaatctctctatatgtgtataattacatgaatcgagtgagggatcttatatatatgcttttatgtgtgcgcacaagtagcgccggccagcttgcatatcattttttaaaagagaaaaagactaaatacttatctaattgttgacatcatttgttgatggcttttttttactattgaatttgttgttaattttaaaatatttgattagtatttacaaaaaaaagacttttgtccaattccattatttttgt

SEQ ID NO: 27321 - DNA, 807 bp, Arabidopsis thaliana columbia
ttttttttttttgatagaagaagtgttgaggtaaggatgttttatagagtggctagatgattttggtctttgggtggtgagacaagttatttatttatttaataaatattagaatgggttgaagttttcatttttgtacaattgggatttggtcattttccaatcacgagagttcctttgaacaaaaaagaagtcaatttagctgattggctaagatgaagcaattatgtcaaaacaacaattttttgtcccatttgatccaactttcatttcaagcttctagatgaaattagaaatgtaaagtagagggccatgagttgaggggaacttggtattgcggtgaatgaaaaagtcaacattcaaaggtttgactgagtgaaactaagatatgtacggtgtggacataaattctttttttttaaatgtattttatctaaatgataattttctccctttaactgctcaaatatattaaatcaatttttttttttgttctttttcttgtttgagggttttcactaatttaaaagggatttatacattatattatttcaaaccaaaaaagttttgacttgtaaccaaaaataaaacaaaattaagaaaacaaaaccaaacaaaataggaaagttgtcaagagattgtcttctacatcatcatcgaccaaacaaacttttaactcctaagaaaagggtatagctcatacctaagagtacactctgttcccaaaactcttgctccttgtttactgtggcagcacttggaaagctcattgatactccattccgaacaaccctttcatcgcaatat

SEQ ID NO: 27322 - DNA, 553 bp, Arabidopsis thaliana columbia
ttccaatctctatttcaactaataatattgtcttctaggttcggtaaaattaggttatactaggcggtcattatgtagagatgtatacgctttaacatgatttctagctaggttagggaactcgaacggaataattatgctgatacttctcctaagatctttgttttttatttggttttgctccatgtttcaattgtagttaggttgagagtctgtttgattatttttttgtcgggaagaactagaaaaatacaaaacataaggaatctttctttatctaccaaaaagattaaagattaaataaacttttggacaactacaaccacctaacatccgacacgtgtagaacaactagatcatttacaaacattttacaaaaaaaagaagtaatgagtattattgaaattaaaaaaaaaaaatcattacgaaatttcagggcacaagttgtgggatggccccggtacgatctttccgcaagaacgtcatgtccggccaaaaaccgaccaccggagatgccaccgaaggaaacgataagacttctggcagcagtgga

SEQ ID NO: 27323 - DNA, 458 bp, Arabidopsis thaliana columbia
cgttcttggcaaccaactttttgttgtagatctctcttgttcgaacaaacctcgcaaactcacataagaatcattttcttgcagatacacgagaacttattccaataagatgacatttgctactgtcaaagcaagtcttaattgtttcagcttaacatttttattttcattgcatttccatttgaaaaattgtattataattttgttttgattacagggaggtggacacacggcagagtatctaccagaagagagttctatcatgttccaaaggtggataagtgggcagcctttgtaataaagactcgtgagttttagtcttttacgtatgaaaaataaaagtacttaccatgaaatgtttgtaatagatgctaatggcttttgtcagctttatgtcctttgtctccatgtcataactttctcgatttgtacgtgatactaaataagttggaatgaga

SEQ ID NO: 27324 - DNA, 458 bp, Arabidopsis thaliana columbia
ggtaaaaatataagaaagagaagtgagctttgaaacaatgtagcattttgttcagttaagtaggaactgattgtgctttaccaaactgaaactggttcatcagctgctagcttcgtgcttcaatcttgagcggtgttgttctccgaatatcaaacctgtctacgaatttcaatggaaatgttgtctcgtttctgatcctcttgatcttaggacttaacaatcccctgtgaccaaacccatacagtttgagcacttgattatccgcaaagttgaatgctcgctccatactcttcaagcaacgttcaaccgcgtaatcagcataactcccacacggtttgcatccaacaaagtgagtaataaaaggccatctttcatctcccaaaccgggatggtacttctccatcatctcctcatacttatccactaaagcttcccaaaacccatgaagatagtactga

SEQ ID NO: 27325 - DNA, 1148 bp, Arabidopsis thaliana
taaactgggatgttagatcaagaattgctattggtgcagctcgtggtctagactaccttcactcacaaggcacttcaacatctcacggcaacatcaaatcctcaaacatcctcttaacgaaatcccacgacgctaaagtctcagactttggcttagcccagctcgtgggatcatcagcaacaaatccaaaccgcgctacgggttaccgtgctccagaagtaaccgatccgaaacgcgtgtcgcagaagggtgacgtgtacagtttcggagtggtgttgcttgagctgatcacgggtaaagctccttcgaactcggtgatgaacgaggaaggagttgatttgccgagatgggttaaatcggtggcgagagatgagtggaggagagaagttttcgactcggagttgcttagtttggcgacggatgaagaagagatgatggcggagatggtgcagctagggcttgagtgtacgtcacagcatccggaccagaggccggagatgtcggaagtggttaggaagatggagaatttgcgaccttattctggttcagaccaagtgaacgaagctgattaagtcaaagattcttaattgttaatttatttaatttgaatgaaatggttggggagaaatcaggtttataattttaatttctaatttttgcacaacttgtcaaaaaggagaaggggttttattattagtgggtgactctgctggcatttgcagttgtttgtgttgggcgtgaagggatttggtggtgatttgtaattattgttgttgcttccctttcttaaatctattttctaaattgttacgtatctttttgtctcttatgttacatgtgagtgtgacttttatatcgtaatataaagttgtatactgtggtggcaaacgcagttggtcagtgttttatgaaaaagatgtgttcagtttttcgaacaaatacaaaattgttttgatatacaatattttttggttggccacttgtggaatgccttttcccggcagtgtgttttgatcatttgaaatgagaaaggttagtgttaatttatactaatttaaattgcagtttaatttgttcatttttatgttgtttcggttccgtatattttgcacttgtttagcttattatggtagatggaagttatatgt

SEQ ID NO: 27326 - DNA, 753 bp, Arabidopsis thaliana
cattttagtcgcagcttcttgagctcaactccgtctagagttatatgacctgaatccggatcataaaacctctgtaacagtgaaatcaccgtagattttcctgacccactttctccaaccaaagcaacagtctggaaacaacataagaaataaagaagtgtgcatataattaaagcccaaatcagttcaaaatcgtaccaaatatattgaaatctataacaaaatagtataaaatcggcagagttctaaaaatgtttttttggagcttctacgcaaacacacacgacttcatgtaaaaatgttggagatggttacctgtccggcacgaatgctcaaacagaggtcacgaaagacttgaacatcaggtctagtttggtaagtgaagcttatgtggcaaagctcgatatctccttttacattctccaacaccattcccgattcgtctctcgaatctatcttcgatatcctatcaataattctgaaaatcgaaacagcagcacccttacctttactcgaatcaggagcaaaagagctcgcctgagaaatcccaactgctgttaacgtcaaggccaagaaaacctgcacaaaaatcattaactacagtatgttctcatcaagatccattacagagatttccaagaaaataaacctgaaaaacatcgttgaagtttgtccttccggctttaaccagtctagctcccacgtagaaacaactagcgtagacagagtaaagaacgaaaaaggagatccaaa

SEQ ID NO: 27327 - DNA, 546 bp, Arabidopsis thaliana columbia
gaatatgaacatgacaactttgtcttctactgcagtgtgctttgtgaagatccgaagcaagccgtggctgtgaaaagtcaattgcagcagctagctagaccaatgtacagcaacccacctttgcatggtgctcagctggtctcaaccattcttgaagacccagagttaaagagtctgtggctaaaagaagttaaggtaacatttatgaaaaaatgctaattctttcattcaattaccttatatcccatgttcactcttttatgtttagtaatcaactatggaattaaaatctgataagccatatgtaaaatctgtaacaggtcatggctgataggatcatcggcatgagaactactttgcgagaaagccttgagaagttaggatcgcctttgtcatgggagcacgttaccaaacaggtaactacaacaacaaaataggcttcttttgtgaaattcttgttatttcctcctttgactcacacagtcatatctttatggtgatacagattggaatgtctgctacagtgggttacacccagacaggtga

SEQ ID NO: 27328 - DNA, 773 bp, Arabidopsis thaliana
gtgtcaatatgtaagggaaatatcaagataaccaaaaaaacaaatgatagtagtcttttggacatgttacctgtccagcacgaatggcgaaacataggtcacgaaagatttgaacgtcaggtctagtttggtaggtgaagcttatgtgacaaagctcgatatctcctttaacattctctaacacgagtcccgattcatctctcgaatctatcatcgatttcccatcaataatcccgaaaatggaagcagcagcaccctttgctttactcgaatcaggagcaaaagagctagcttgagatatcccaatcgctgtcatggttaacgccaagaaaacctgcaaaagatcattagttttcttcgtcccaagatttcattacaaagattcccaagaagaagaaaaaacctgaaaaacatcgttgaagtttgtccttccggctttaaccagtctagctcccacgtagaaacaactagcgtagacagagtaaagaacgaaaaaagaaaaaccaaaacctacaccacaaaaaaaaccttgcataaacccagaaaaaatcgtatctacacatcgttactaatacatctccatcactttaacctccgcacagaaagacgcaaccattcttatactccccactgcatcgatcgccacctgaatcgcctcctcgtactttgcctgcaagcatcatttttaatactattttaaatatcttctgtgacgcgtaacaaaccctaaccctcgacaactcgttttttttcacgtaggcctgttccgttct

SEQ ID NO: 27329 - DNA, 531 bp, Arabidopsis thaliana
acaagtaaaccattttcttgtaaaaggatctatagacttggcagtgatgtataacaggtgacactaacagaagactaatcatcatcatcattcattatcatgagttgcaaactttatagagtagtgtgagtctcataaaagcttctgcaatagaaaatttacagattgctactacacctaaacacttccacaccacaacacaagcccatctcaaatttcaacgttcatggcaacgtggacaacataaacaatcaaacagatgatcaatagtcttcctttttaagctctctacaatttcagttttctatcaagaagaacaacatccacctttcttgaactcgccctgcccgtctgatggtatcacaactttcttgccattgctcagtgaagcagggtcttgcttgtttagctcctgtgagctcatcactttcctgctcagtatgttgtatatctccttcacaaccgtctcaaatgcagctgccacgtttgatgagccaaagccgatgtctccatgaagaaaagaccttgtgc

SEQ ID NO: 27330 - DNA, 519 bp, Arabidopsis thaliana columbia
aggcaattagggtttatgttaaagggtttgcgtcacgttcaccaccaaatcgattctctccaaattccgttttttctcttacaggtgagtccatagctcgatctcacaccaaacccattttaaattagagcaatcatagaggaaaagttagggtttttacgctctttgttatatgaggaattgaaatggtagatgaagctaatttagacattgaataaacctttgaatttcgtaggtttattgaaaattagctgtaaagttatgttctttacttatctcaagatgaactttacgattcagggagatgcaaaggagacaatccctaatttcctcacagaatgtggagcttcacatctggttactgatttctctcctttacgggaaatccggcgttgtaaagatgaggttgtcaagagaacgagtgattcattagcgatacatgaagttgatgctcacaatgtagttccaatgtgggctgcttcgagtaaattggagtacagtgctagaacaattaggggt

SEQ ID NO: 27331 - DNA, 523 bp, Arabidopsis thaliana columbia
tattttttttacagattcgagtcatttgtggtgttgatcatgaggatctcaagagtctaaaacttgtatctaaatcgattagagaagctgtaagttccattttttctcatcatttgagttttgattgatgcaatgttctcatagcaattttgaactataacagagtttggtagcaaaaacgttacattttgcgtacaccacacctaaaaagactcgagcttttcgaaactcgatcgatctcgaggaggtttcggattccaggcatcaagaggacgacatagagcctcctaatgcaccgaggcactatcgatggaccaaggctaagaggaaagagcaactctctagcgtctctgcggctttgtttacatgaaaaaatgatatgtgtaaatgctttgattctagtggctaagtgtttcacacacttcactttgattaccactgtgaaattctctatgatggttattctttagattagtttgcatttgattcagaaaaagtcagggttactgatgattttagtata

SEQ ID NO: 27332 - DNA, 578 bp, Arabidopsis thaliana columbia
ctaaaccgtggagaaaataggtcactaagtaaaaatgaccaaagaagatgttcttcatagatcagtgtatcaattaacatatataatatctttgtgagacaaaggaaacaaacctggctaacaaacaaagcttcttccatctgaagggccaatttcaagcacaaattcattgaaaagccagatagcaatgacataggtaacggggtaacttcctgcgtcatcattactcggtcgtttggctgtaatcccggtaactcagccatgccagctgaagatagccaatttataactgtttcacatgctggttgtgccatggtgtaggaaacaacccaaaacatgccaatcgacctatcatccatattcatataatccatcatccgctctcctgacaaccccaaacaagaaacagaatgagaggatgctttttataatcgggattctctgcttcctagtctaagccctgccattgaaaccttatgtacctttgcttctccaccactcatcgatctgtttcccttcaacagctgttcattgtttaggtatgcctagttgttgtgcttagtgaccaaatccgtaga

SEQ ID NO: 27333 - DNA, 663 bp, Arabidopsis thaliana columbia
  unsure (1)..(663): unsure at all n locations
gttagcggaaatgaagagccggtgagccaagaggacatgataatggggaccaagaagatggaaaacccataaacccaaatgaaatagaacgacaactggagaatatgccagagcaagaaagtggagttggtgacaaggaagagcaagaaactgaagttgtcgatatgagaaagcaagaaaatgaagttgttgatatgggagtggaagaagtacatccccttgaccgaagtgaagggcgtacactcagtcctcacagaaaagagagagaggacccacgtgctagcggtaatgaagaatcggtaagcgaaaaggcacaagattatgagaaccaaagagatgaaaaaatcaatcaaagcgagagagaagaacaattggagaatgtgctagagcaagaaagtagtagagatgatgatacaggagagcaagaaactgaagttgtcggagtaggaaaagaactttcccttgacaaaagtgaaggacaaacacttagtcctcacagagaagagggagagaccaactcgattgtggaacgaagactggtaaccaaaagcacaagataatgggaacaagaagatgaaaatcatcaataaattgaaggagaagacaattggcgaatgtgnagagcaagaaagtagagttctgacaagaagacaagaactggag

SEQ ID NO: 27334 - DNA, 1071 bp, Arabidopsis thaliana
catctctctcctccatatctttccattcaagatcgtggtgagacagcaagcttcgggaacagaactcaggtagttccataaaactggagcatgattctctgaccgttcaatcagaaatgtgagtcgaccatcaaaacctctagtttaggagaattagagagcaaaaccacaagtgattcacacaagtccgggtaaaatcgatgtatgctacactctttaagtagagagtaaacggcgttacaccatgcaaccattgtatcaccacgtatagatagctcaagatactcgattgaagaaagagatctcagaagtaaacggagcatatattaattagagtgccacgtcagcattatttttttataatgataagtctcctccgctcaatttcagatcagaatcagatcatccatggaaacagcgtcgagagtggaactgattgttaaaggcaacttaccggaggttccttctcagtacattcagccaccggaagctcgacctaatctccattactccggcgatgcagcttcgatcccaaccgtcgatctctcgagctccgattccgcgagagaagccatcggtgacgcttgtcgcgactggggagccttccacgtaatcaaccatggtgttccaatccatctccttgatcggatgaggtctttaggtctctctttcttccaagactctcccatggaagagaagctacgttacgcctgcgactctacctccgccgcatctgaaggttacggtagccgtatgttgcttggtgctaaagatgacgtcgttttggattggagagattactttgatcatcacacgtttcctccctctcgtcgtaacccttctcattggccgattcatccttctgactacaggttcatgctccttttgattcacctcttagttctgacaaaatgttacatctctcgattgattgatttgatttgatttgattggtagacaagttgttggagaatatggtgatgagatgaagaaactagctcagatgctattagggctaatctcagagagtttgggtcttccttgttcatctatagaagaagctgttggtga

SEQ ID NO: 27335 - DNA, 594 bp, Arabidopsis thaliana columbia
attcacagatagagttgcgacttatggcacacttttctagagattcctcgttgatttcaaagcttagtcagccagaaggcgatgtctttacgatgatagctgcaaaatggactggaaaagccgaggattctgttagtccacatgatagagatcagaccaaaagattgatctacggaattctttatggaatgggtgcaaacagactcgcagaacagcttgagtgcacctcagatgaagctaaggagaaaattcgaagctttaaaagttctttccctgcagtcacctcttggctaaacgaaacgatttcattctgccaggaaaaagggtggggatgttaccgtctatttccccttctatttgttttgaatgcagtcctatgtgttcctttaaaccacatatttatgtgatcaattctgaagctatattttcattatttcttgctggagacagaatatgcagctttataattaatttggttgcttctttatgcactataatcttaattgtagaacattttgatatgcagatacattcagactctcaagggaagaaggcggttcttgtcgaaaataaaatttgggaatcccaagagaa

SEQ ID NO: 27336 - DNA, 571 bp, Arabidopsis thaliana columbia
gaggttccctttcctagaaaatatacatatctgcttcttattatatgcgtcagatgataaactttttgatgcccataactatgtagctacatacccattggatcttgtgagaagaagaatgcaagtggaaggagctggtggaagagcaagagtatacaacactggactctttggaacattcaaacacatattcaagtcagaaggcttcaaagggatatacagaggaatattgcctgaatattacaaagtagttcctggcgttggcatcgtcttcatgacatacgatgctttgcggagactcttaacttctctccccgattgacaactcccactcatatacttagaggaattttagctgcttatagagttagtagaagaaagaaacaacatgtttatttcacacttggtcatcttttcaaacactttggtagtaaattttacttttcttactgccgtagagaaaattttacagtgtataggttagttccacctggggtgtaaaaacattcataggcatcatatttacactgtccacgtgagcatatctcaaacacgacacatttgttttgtc

SEQ ID NO: 27337 - DNA, 1030 bp, Arabidopsis thaliana
acttatagtgcaggattaaaacctgatgtttgtccattttattgctcttactctggttatcaggtaaataagtaaatgagtttttcctttacatgtaatgatcagattttggaaaattgtgaaatttaaagagagatttgttattttatgatatttttggtaggatgaattgttgtggggagctgcttggttacaaaaagcgacaaagaatataaaatatttgaattacataaaaatcaatggacaaatccttggagctgctgaatatgataacacttttggttgggataacaagcacgctggtgccagaatccttcttactaaggtaaaatctaaatttataaagttttgttatatcaagtccctaattatttttgttggttttttttttgtgtaaaggcatttttggttcagaatgtgaagacacttcatgaatacaaaggtcatgctgataatttcatctgctctgttattcctggagctcctttctcttctactcagtatacaccaggttcttgcatttttaatctttcactaattttcacttcatttacatgttatggtaattattttgtggagttttttacattatgaactttttctgttttggtgtttttttagataacctattttagagaagatatttatttgactgaataaatttgctctttatgaatattaaaacatttatatacatatgttatgtaggtggattattgtttaaaatggcagacgccaacatgcaatacgtgacgtcaacatcgttcttgctcttaacctatgccaaatacttaacctccgccaaaaccgtcgtccattgcggtggctccgtctacactcccggtcgtcttcgctccatcgccaaaagacaggtccagtgttaaaaatctctcaatctttagattttaggttattttgttagatataaaatttatgacattttcgtaaattcttttttgatatataggtggattatcttcttggagacaacccattaagaatgtcttacatggttggttacggtccaaaa

SEQ ID NO: 27338 - DNA, 432 bp, Arabidopsis thaliana columbia
cctcaaactctccagtaaatgtggatcctagaatcgctgcaacacagatggaattctcatccaccatctctacagctttagctgggtccatcacgtaatagtcttcacttagtttcacctctttgagctctacctcaaagtaccttgcaaacttctcacagcacacctgagcggatgaaacaaagtttgacaatgtactgatttttgaaagaaacagatcactatccaaagcaaatgtgatggtttggaggataagaataagtaaatatttagacctgaacattgactccagtaacaatgtcaggcttatcaataggtagaccctgagcttttctcctatgttgccatttcatcttgacagctaaaccagcagactcagatgaagcaacaattccacaactaataacagcctcgtctagtccaacacgagca

SEQ ID NO: 27339 - DNA, 1499 bp, Arabidopsis thaliana
ccgtgatattaactcaaaacttatataagaaaaatgattcagactactcctcaagtaaacattttaagactttgccggccaaaccaatttacttttagagcaaactctggcatgcctcaacttcaaccgcctgcgaatccaatacagactgtcccgatggacactcgcgatcactctttatcactgcattgagtacggtttttctgaaccactcatcttccatcttcttcagaacatctctcaccagctcgaaatccaagactttagctgagaccaactcccctaagaactctccgaagctgtttggtgcttttggcagatcgattccaatgtcatccaacatggaaccgtagagcaaacaacctgcccctaagtctttagatgtcagcacattcttagagatcagatgtttcaagagtttggcaattggttcaaccaatggtgggtttttctctagaccgagcgagattgtttccttgacgagctccgggtggtaagatggagattttagttcctcaacgcattgcaatgcctcatccactaaacgaatactgaaatactcttcaagaagcgacttggttttctctcgagctctcctgcgttcaggctattagccagaggagctgcctgtggctgtggctgaggttgagaccgtggttgcggcttctcaacagttggaatgggtttagaggcttgaggagctgagctagaaccgttaccttgcaaaagagggcttggcctaccaccaccattgaggagacctccgctaccctgaggaagaagccttgagttgactgagagtgacttgttgatagcaggaggtggctgaaaacgcggctgctgcactgtttgtctattgcctctgggcatggaccgggtccgtgccatttcccagccgtcttcatccataggcatcaccctagttcccggcatgccgggcatcattcctccagtaccaggacggccaaggatatttcccaagcccataccgtctgctgcaccagaaaccgcagcgcggttgttgttgttgtttctcatacttgccattgcacccggacgcatcccaagatttctctctgcctcagaatggatttcattgattttcttcgctttcacctgccattgaataagtacaacaacacgtaagcacggataaagaactaaagactgttattaaaagatttgagatggaatgataaaatcttacctcctcacgccttggtacccatttattagctcgaagatcaacaacgttttggaccataaatctgagacgcagctctagctgagggtgccttgctagctccttcaaccgaccaaagtacgtgtcattaatacctcgagatcgtgggctgtcatcaagttgcttcccaatggttataaaaaattggcagagagcttcaacatctccctctgctgggcaagctttagtatcgtctcctaaaagctcctgaacaatatgatgaactatcttctcaggcaccatcttttcacccttg

SEQ ID NO: 27340 - DNA, 332 bp, Arabidopsis thaliana columbia
acccaaggatcttgaaactgggttcttgctctacggtgctatgttggacgacattggaattgatcttcctaaggcaccaaacaattttggtgagattgtgggaaagctgattctggctggtggtgtggatttcaaattggttagagaaattatagggaagatggaagacgataggttccagaagatggtggtcgatgcagctgtacgcattgtggagtcaagcgagcaggggaagtccttgttggcctcacaggctgcagacatagaggcttgtcggaatctgtaaaaggaatcattacttgacgattttgctctctctgggtcttatgctt

SEQ ID NO: 27341 - DNA, 602 bp, Arabidopsis thaliana columbia
gtcatctggcaacgcaattatcctctgtagagaagctagcatctgcagcaaaagatgcagattgttgaaaaccaattaaaacaactgacacttaataaagtcaagttcagagagaaccaaagattagataaatgatgtttacctgctctggagtaccttcaaagagtttaccacatgataagctaaacaaggtgtccccggtgaaaattgctcgtgcccctggaaagtagaaactaatatggcctacaacagaaaatgggacattaaaatggggacaaggcttaagcatatactgtgcatagtttatgtttgaggaaccgaaaccagcaaatcttcaatagttattgagagaagttaagaacctaatcaactaatcacagggccaagggaaatacagagttcttacttcttagagcatcaaagaatattatgacaaaagcaacacttattagaatagaaacttatttctgtgaatctttcaaaatatacaaattcttgaggctcaaaatgttatttaatactacagaccagtaaactatacagcgctcacaagtaggatatatttctatatttcaagcagtctggagagaaatccccacaca

SEQ ID NO: 27342 - DNA, 508 bp, Arabidopsis thaliana columbia
ggtgcacaggctgttacaaagatccatgaaatatttgattgggctaagaaatcaaacaaagggttactgcttttcatcgatgaagctgatgctttcctatgcgagtaagatgctttcaccttttacctcaagccttcagttatattactgattctcatctactagacctctaaaatatagaatatagttgaacaaaaatttcttgtattctgattgcaaacacaattccacaatgtagtatagtcgcagtaggatcagtggattgttcttgcgcattgttacttctactgtatctccagagttctcttgtcttaatagttatcaaattcttgatcttttatcgcagacgtaacagcacttacatgagtgaggctcagcgccgcctcgtgaacgcgttgctctttcgaaccggtgatcaatcgcgggacatagtccttgtcctggctacaaacagacctggagatctcgacaagtgcagtctactgcaggatcgacgaagttatcgagt

SEQ ID NO: 27343 - DNA, 1045 bp, Arabidopsis thaliana
ccattgcaacttcccgagacccaattgaccaacttgaccgaacttggtcataatgttttggtcttttgggaaaagctcgaatgttgttgtgatggttttaagatcttggagatttggtgtgcggagatttcgttggaaaggtgggagggaggcgagattttggggaggtgtgattggtgccatcctatcctcgcaatcaatcttctcacggtcgatcctctcttctaccactctatggtcttgtattctatccctgttgatgtttgaaaatttagattttcttatactttataagtgttacttttaagtatgatttataagatcacacttaattcatagtaggcagtatgtttctcttgctaaaagcagtcacttgtttattgttttactcaatgtgaaaatatttagaattgtagtatgtaattaagaagaagcaccaaagctagctttacttaaaacgaatctaacttcttcacatttctaattcttttttacttttccacacaacatcgtatttacactaaccaattaaaaagaaagactcaaatttttcggttacaaatgtcaaacttgcagaattgagaacgtactactatgtaactgacacccaaaactagtgacaaatggtcacctaacctatgggcctttgtcttacccaacctaacgcttgtaattagttccctattttgtccccatgcacacacaaataccaatatttatgagcacaagaacaaacattggtaaagaaaagattaaccaaaaaaaatgaagatgtacccaaaatctgactcagacgtcacaagcctcgacctatcatcaccaaaacgtcctacttactacgttcaaagcccatcacgtgactccgacaagtcttcctcggtggcactgactactcatcaaaccactcccacagagtcgccgtcacacccatcaattgctagccgggtatcaatggcggtggtggcggtttcggtggaagggacggaggaatacacggcgggatatggtggcggctgataggaggaggtggtgatgacggtcgagg

SEQ ID NO: 27344 - DNA, 544 bp, Arabidopsis thaliana columbia
cctttgtgataggcggttgaagatttgactaaagcacttgtttttgagccaaactcacctgatgtattgcacgaaaggggtaagtgtctttattcagtgtttcttttaaaatcttgcgccttatttcagttttcatttcttaatacatgatttctttggtgaaaaaccatgaagtactactgacattcacaatggattcaggtattgttaatttcaaatctaaggacttcactgctgctgtgaaggacctatctatatgtctgaagcaagagaaagataacaagtctgcatacacttatttggtaagactattctctattgttattcgttattcttggtttccaaagtaaccatggacgcaaatgttttcgtagtaaaactttgttgatctctccagggactagcatttgcttctcttggtgaatacaaaaaagctgaagaggcgcatttaaagtccatccaattggatagtaattatcttgaagcatggcttcatctcgcccaggtaacacacgaataataaaataaatagtatgagattatg

SEQ ID NO: 27345 - DNA, 526 bp, Arabidopsis thaliana columbia
taatgcagcatctgaaagactcaacagatccagtgatgaaaggcattttggctgagacagaactcatgttggctcaggggaaaatggatttacctctcagcttatgttttgcagcagccagaggagacgatttactgctgcatcagttgctgaaacgaggctcaaaccctaacgaaaccgataagaacggtcgaaccgcgttggtaagccccgaaatcccctgtacaaaccaactatcgcatcatttttcactccaagaaaaatatcaaaatcctcactctgtttgtatttaaatctgtgtatgttatctcagcatatagcagcatcaaaaggaagccaatattgtgttgtattacttctcgagcatggagcagatcctaacattagaggtaaaatataacaaaggttttatgagtccatttcgcttttataatctggtgatcgtctagttatataactgcttaactaattttgcagattcagaaggtagtgtccattatgggaagcatcattgggagcatgaaga

SEQ ID NO: 27346 - DNA, 596 bp, Arabidopsis thaliana columbia
  unsure (1)..(596): unsure at all n locations
tagaggataangaagacataggtttcgacttttgaatgtatattgttgtagacatgaataagaatacctacagatgtattgaaaagaatatagaactcgatcaagtcatgaactgatacatagttaattctaatattccttacgtgtctattgggcaactctgaaattcttgaccgtacaacatctattaaaggcaaaaaaagccctcgagactctattcatgtttcaatctttacagccatggaacaatgtcgcttgggaacagggctctattgatcttgctttcacacagtaaggctcatgggcagtcccattctcagctttgttcaacacccatggcttcaaccctccaaggccatgagcaacctccacgagtgaggaccataaacctgtgaccaccagcgcatcagaacaactcagaaggtatatctcagcccatgctctcttactttccatgttcctcggggttttttggtagtccttgtagctcggcttgtgaacgctgattatctctccatcactgttgggttttccaatatacgtcctgatactctaaaattacctggagaagaagatgagataacactgcctttgat

SEQ ID NO: 27347 - DNA, 535 bp, Arabidopsis thaliana columbia
actaataaaaaaaaatgatgataacatgatcaacactctacctaacaatatgtcaatatacatatccaatagcatgcatcatctatgcatgattgttaaagtgatatgaaaaaatgtagactttttattatacaagaaactagaaatcacattggaaaaggagttacctaatcacaacaattcttttggcctaatctcgatcccttgaacgatgattccgcctttccaaccgccttctctagtctccaatacgctcatttcgatctcctcatcatcaaaaccaacataatattcaccaagttcaatctccaaccacccatcttctctagactcttgtgttcctgacttaagaaaaactcttctattgttataaacttcagttcttgtagaacgaaagctaacctccaaaggcagagactcaaatccaaaggatcccatttcttgttctttgaaaacaaggtaagcactgtaattagtggctttggagagaagggatgtgcttatttacctcggatttcaaccaacataccattag

SEQ ID NO: 27348 - DNA, 533 bp, Arabidopsis thaliana columbia
ggtcaggctggtgtggttagggaagaacctcaaccggtggagagtgtaactaacttcaatggcggattctatggatttggcagtaatggaggtcttgggacagctagtaatgggtttgttgcaaaccaacctcaagatttgtcaggaaatggagtagcggtgagacaggatctgctgactgctcaaactcagccactacagatgcagcagccacagatggtgcagcagccacagatggtgcagcagccgcaacaactgatacagacgcaggagaggccttttcccaaacagaccactatagcattttccaacactgttgatgtggttaaccgttctcaacctgcaacacaggtgactaaagaacctaagctactacattttgtaggaaatacaatcatctgaaaaatattagacgtagccttcatgttttaagataagctggttttggatatgcatgtatgtttcagttatctgagcatgacttgtttttacttttttcgcagtgccaggaagtgaagccttcaatacttgga

SEQ ID NO: 27349 - DNA, 490 bp, Arabidopsis thaliana columbia
caagacaagtatagatttttgacgaggaaacaagaagatccttttggtgcttttagctcaattgtttctccgagtttcacttccatgtctgtttctgtaggaataccatctacataattctttagtatcactttcttgttctccaccactgaaacttctcccatttgttatgagtctgtgatggagaagaagaagaagaagatgagttacaacaagttttgttgcaaagagatggttttggttgtgtaggagagagtttggtaagacgagtgtttctcgtttatgtgacgcgtaggttttttaaattttggttgaagtcatttaatgcgtatggttttgtttggttcacccacttgattgggtttccccggtttagattattcgcgtcttgcgtgaaattgttggccctttaacttttattcaattacacataccagtacaatattatgttctacacaaatatgtattcacagatggttacgaagtatat

SEQ ID NO: 27350 - DNA, 567 bp, Arabidopsis thaliana
gttatcctttgtctcttcttgcattaccgtataacaaacccagtgccaaatgcctttgctctatggctggtctctgtgatatgtgagatctggtttgccttatcctggattttggatcagtttcccaagtggtttcctgtgaaccgtgaaacctacctcgacaggcttgctttaaggtaagttctatttccccattcttctgaagcaattactcaaaggattgtttgcctatactgtttcccattttaatttgatcatggtcaatttttgggacagatatgatcgtgaaggtgagccatcacagttagctgctgttgacattttcgtgagtactgttgaccccttgaaggagccaccccttgtgacagccaacacagtgctctctattctggctgttgactacccagttgacaaggtgtcctgttatgtttctgatgatggtgctgctatgttatcatttgaatcacttgcagaaacatcagagtttgctcgtaaatgggtaccattttgcaagaaatatagcatagagcctcgtgcaccagaatggtactttgctgcgaaaataga

SEQ ID NO: 27351 - DNA, 508 bp, Arabidopsis thaliana columbia
gacttcttaacactgtttatgtgaaaaagtacaatactattcatgttgcagctaggaattcagtctcaggatgatgatgatgttgatataactgtggatgaagcttggaataatatcgttgaacgcattaagtatatattttctgatgaggttagtacaggtcataagcaagtccatagtccaaaagttaatttggtttttctctctattggcattaacgtttaagttgttgccattgcagtttctttcagttgatcatcctctaggaggtcacctaagggcggcattgcaaagggatggcgaacgttgcggatcacttcctgtttctgtcattgctacatttgatgcaaagattaacagtcgctgtaaagtgattgatccttctgtagaatcagatcctatcttgctcatgtcctatgtcatgaaggctgctgcaaagttgccggactacattgttgtatcccgcatgtcgattcctccgaagaaaaaaccgtatccccagcaacta

SEQ ID NO: 27352 - DNA, 966 bp, Arabidopsis thaliana
tctgatttggggggacgtgtttcatttcctgttattgttgtttgtggttactaagctattggtttgctatgtcacagcacatccaagaccaatggtacctcagaaagaccttgcggtctatggatatggaagtgttgcgtggaaggatcgtatggaggagtggaagagaaagcagaacgaaaaatatcaggtggttaaacatgatggagattctagtcttggagacggagatgatgctgatattcctatgtaagacagacccaaatactgtcttttgtcatgtttcactgctttgctttgatatttacgagttttgttgttcttgttttaggatggatgagggaaggcagcctttgtctaggaaagtaccgataaagtcgagcaaaataaatccgtacaggatgctaattgttctgcgtcttgtgattctcggtctctttttccattaccgtattcttcaccccgtcaatgatgcttacgccttgtggctaatatctgtgatatgcgaaatatggtttgcggtttcatgggttcttgatcagttccctaaatggtatcctatagaaagagagacatacttggacaggctctcattgaggtacgaaaaagaagggaaccatctgaactagctggtgttgatgtttttgtgagtacagtggatccgatgaaagagcctccgcttattacagcaaacactgttctgtctattcttgcggttgattatccggtagacagagttgcctgttatgtttctgatgatggtgctgctatgcttacttttgaagccctttcagaaacagcagagtttgctaggaaatgggttcctttctgtaagaaatacactatcgagccacgagctcccgaatggtatttttgccacaagatggattatttaaagaataaagttcaccctgcatttgttagggaacgccgagccatgaaggtttgtttattcttgcttcttta

SEQ ID NO: 27353 - DNA, 902 bp, Arabidopsis thaliana
ctcatttccaatcgatggagaaccttctcatcgtattcaagacccaatgtttggaaaatgtacgggagacgcgaaaccttcacagtaaaataaccacaacaacttattcaatccctcaaacaatcgaagccagcatagatatgcaccaaaagcttctataataagagtaacattcatcgaagaaaccaaattacacataaggattatcttcaactctagatcttgtacacaaacttcaaattccacgaaatcaaacacagaatcgataaatgattgctaaatcgaacgaacacgatcatcctaaaccctcgatcttgtaaacaaccaatgtatacaaaatcaaacacagaatcgagaaattgattgttgctaaaatcgaaattacctcagggcgaaagagaacacgaagggtgagattaaccatctgaagatccttagtaccagatttggaggagaaagtgtgaggtttcgtacgaatatcgtatatgtgcggcgtctggagatacgggatcaagaaatgagtcccttcgccgacggtctgatccaacactcccctgaatcgatcgaacaaaacagctctctcgccaccatcaacagtgtagagcgacgagtttagtgccgtcgccgccacacctaacccaaacgccgccttcgccaagttcgtcagaaacgaaatcgctacttgttgacttcccattttcttttctgacctcacaagaaaaaagcttcgaaggagagaattgagaaaggaaagatttaggggtttgttagggtttatgaaatgattttggaacttggaagagagggttttttttggcagacaattattgaatatgggcttgtttaaagcacattaataatataactacttcggccaataataaaaaggaaaggaaatgatg

SEQ ID NO: 27354 - DNA, 664 bp, Arabidopsis thaliana
cccatttccttgcgaattcagcagtctcagatagagcttcgaaagtaagcatagcagcaccatcatcagatacgtaacaagcaaccttatcgacaggataatcaacagcaagaatagacaagacagtatttgcagtaataagcggaggctctttcaatggatccactgtactaacaaatacatccacaggggatagtcccgacggtttcccttctttctcatatctgcaaacaaaaaaaataaggattatatccccaaaacaaagttttaacatttccaagtgtaataacccacaagatgtaagtaccttaatgagagtcggtccaagtacgtttctcgctcgatagggtaccatttagggaactgatcaagaacccatgaaacagcaaaccatatctcacatataacagaaataagccacaaagcatatgcatctttgacggggtgaagaatacggtagtgaaagaagagaccaagaatcacaagacgtagcacaattaacatccggtaaggatttatcttgctcgatttgattggtatcttcctagacaatggctgccttccctcatccatcctaaaatggaaaaaaaaggcttgataaatatcactgcaacggaacaagacatcaacaagaaaaattatattctttgcatacattggaaaa

SEQ ID NO: 27355 - DNA, 448 bp, Arabidopsis thaliana columbia
cgattcccttgctctcttattgatgagatgcggttttgaacttgcttgccaagatttcggactagatggactgatggtgtttcagcttcaccatgttttcgacaatttctttctttccaaattgagtaaatcgccaactgaaagacataccttattaagaagaggttgatttttccaatggttttgtctatgagtgtcttgtggacttcactccatcttgttgtgaattttgtgccaagaagagtacgacttagcccggaccacacctcctcagagttcttgcatctaaagaaaagatgatctcggtcttctaatggtgcttgacagagaacgcataatgggcactccagtccgccaacgtagcattctgtcacctgtggccaatctgttccttgttgcaagccatgagataaaagagtattttggggttgaatgggcgaaccatata

SEQ ID NO: 27356 - DNA, 531 bp, Arabidopsis thaliana columbia
ggtaaagactaatatctggtgcggttggtcttggcaggcaaaggcttcgttatcgacaattagtcaatagcaggttaaagcttaatggctacacttcattattaatccctttcccttataacaacatttggaaacaaaaaaaaaagggtgatgatggatggaccattttggcttatgtttttattgctcaataacagtgacatgtgtttatgtgtgttatgatttaaaagttttgtttttttttgctgatggatttgttttttttctttttttttgttaatggcttttgcagctttgcggatcttcagaagcctcagactgaacttgatgggaaggcttgtgctggtgttggacaaagcagtcttatggcttactatgagactatgtttgaccaggtgatttttcctttgttatcgaattctagattattgtgtaagacatccaaatattgatgctgttgtttttctttggttagcttgatgtgacggcagctcaacttctggtgaatgacagtagttttagagacaagga

SEQ ID NO: 27357 - DNA, 553 bp, Arabidopsis thaliana columbia
ggataacgcaagatcagctgctcgatcattggttcttggtggtctttctgataagcatcatggcttgaataacttctgggtagctgatcgaattaacgtaaggccatatcttgacattgttttcacttcagttttcagagaacagatatcatcttctgatacatggatttgcaggatattgatgtggaggcattgcggatattgaacatgtgttacgagcgtgctaaagaggtaaagtagacttctaaatcaactacatctatatcatagcatctcctttatattggtcttgttaaatatatatttacaaacgcatacaccagattcttggaagaaacaggacgctcatggacgaggtggtagagaaactggttcaaaagaaaagtctaacgaaacaagaattcttcactcttgttgagctctatgggtccagtaaaccaatgccaccgagtatccttgaacttaggaagatcaaacggcttgagctagaagagatggtgctgaaactggacatgactaccgcaagaaacagttcataagatgattgtaattt

SEQ ID NO: 27358 - DNA, 571 bp, Arabidopsis thaliana columbia
tacaataacatggtacaacaatctctcttccaaatcgtgacagttcaaaactatctgtttgcatatgaaatcacagctcaaggagtgagggtgctcacggtcgttatggcattggaaactggaaataccccaaatgccgagaacatatgtcgagtgtaagcttgtttcctttcacagttcttcttagttgtccatcactgacacctggtaatacacctcaactgatacgcggtgattgattggtggcttgtaggcgaaggacaagcgcaaagccttcgtggatgtctgcacaaacttcaggtttcattttttgtgaaacgttaatttaacttactccgtaagtaggttggtggctgaaaaatccatccccttttgcaggcctgtcatgcattactttttcctggaaaagtttctgcagcctgctgactggtttgtcaagaggcttgcttatacacgtagtgttgcagctagttcaatggaaagtatattcagttttgatgatatttacctctttcagcttaagatagatgggaatttcaatttgtgtatactttagaatataaaacggaaa

SEQ ID NO: 27359 - DNA, 544 bp, Arabidopsis thaliana columbia
gttgttggccctgtacagcagcaacaaactttcccactaccatcatttggttttgatggagactgccaatctcatcatccaagaaacaacttagctttccctggtaatctcgaagccgtaacttctgatccactctattctcaaaaggactttcaaaacttggttcccaactatggcaacacaccaagagacattgagacggagctgtccagtgctgcaatcagttctcagtcatttggtattcccagcattccctttaagcccggatgttcaaatgaggttggcggcatcaatgattcaggaatcatgaatggtggaggactgtggcccaatcagactcaacgaatgcgaacatatacaaaggttagagatctttctctccctttccatagctctaatcttttgcttcttaattttcgaatgctaaatgccgaaagttgttaaatcattgaaggttcaaaaacgagggtcagtaggtagatcaatagatgttacgcgttatagcggctatgatgaacttaggcatgacttagcgagaatgttt

SEQ ID NO: 27360 - DNA, 591 bp, Arabidopsis thaliana columbia
tacatacagtattctaaaaacactttttaaatattatataaccgtatatataaattgatacagctttaggttcaactctttgtaaaacctcaacatttcattctaatgaaatacacattcttatcaaaaatatataataatatagatatatagagccagagtaaactgataatgagatacttaatacaaccaaacaaaaatctagagagagatagagaatttcaagttttcaacgcaaagccctctcttatcatccgtacatatcttccatttcgatcttcaactccctctattcaatttctttataattatatataaatagtatatggtgtctactcagttatataacacatcttcttcataacctctctctttcctcatcgctctctctatctctctttctttgtgggttctagtttgtgtgtatatatactatatgcacatacacataggaagatatgatgggttacgagcagatgaatcagatgacaatgacgacaacagcgatgatgaagaattacaataagaagggactaatcaatactccacagaagaaaatgacgaggagaagtgtgtacggctatgatggtg

SEQ ID NO: 27361 - DNA, 619 bp, Arabidopsis thaliana columbia
caactgggcgtgtgtctcgtgctccacctttacgtcccatagccaccattggaggaggaggaagtaaaccggatctgaataggagacgttgaaccgggtctgatggctgagcaccaacagataaccagtacctgtacagaacaagagaatcaaacaaaatgtccattaatcaaactatatgcatcctctgttgaaactagtcattcagaacaaaagaaagacagaccaggatctaacttttaagtagtcttgacatgtgttcttctaatatccggacattataatcttaattttagatgatgataaagagcatgacaagattctaaagctacatgaccatacaattatgcaaaagaggttgtatatggtgaacaattaagaatgtaagtaagtgtgtatacgaatagataatcaacaggttcttcatcttacactaataagaaacaattccagaactcagagcagaagttccatagaaagactcaagactggcggagaagtttcatttgttatataacaaaacttgttgatgaatttcccaaatatttcagttttcctttcataagttagtgattaatgaggtagaaaatgcttcactaatggtcaatacatgaagaga

SEQ ID NO: 27362 - DNA, 610 bp, Arabidopsis thaliana columbia
tgatgtttaggaaaatgtacatatttaaatctaatgattcatgttgggatttctagaagttagggagaccttacagctggtggttatatcgagatctagaaatttcaagaagggttttgtttacctgctctcataatgtcatctctattctatactgggtaggcattgagcgttggtgttaatatccaaactaaatgaagtaaggaaactataagaaacatagggcccttgcatttgaaccatagtatgacctttattatctctggcaagctcttgaggatctgagtggccatcgcttatataacagaaatattttcacataggaaggctaagttcttttatttatctgtcttgttgctatagacattgacagggggtgtcttgctgctcagaaataagtattacattgtaatatatcgtgggaaggacttccttccttcaagtgtggcagctactttagcagaaagacaagaattaacgaaagagattcaagatgtcgaagagagggtaagaaatcgtgagattgaggctgttcacctgttggtgacaaagtccagcagaagctggactctggccgagttttatgaggccaagccgatggggaaggaat

SEQ ID NO: 27363 - DNA, 522 bp, Arabidopsis thaliana columbia
ttatatgatcaagtcatatttttgacatttccgtctcaagatttgttggaagattgcgagtaatgaaatttcatctcaaaacgaatgaacagaaaattgactacaatcttgattatctgcaagctggtagaacttaccaagagtaggtgttcaatatcgttattgtcgagctctgcttcatctccttcgttgaggatgagaagcgaatccaagaaatctctgttggaaacatctttagagtaattccctaatgatttttctgctattttagcatccatgaacccacggaaaaccctaaacaacctctccgtcagacccctcattgccttcctattaccttgtaggtcaagaaaccccataaatggaaagtagttagcagcgtctggtttcccagcagcttccatggcaccaatcaccgtgtcctgaaattcgttggattttttcgagtcatagctaccgagatcaaccgaaaacagaatgttggatatgatattaagaactgtggtgtaggatgcacgagaa

SEQ ID NO: 27364 - DNA, 456 bp, Arabidopsis thaliana columbia
ttttaaaattacctctctaatcttttgacgggaactacacttcgttccaatggccattgttttctcttaatttttgtttaggctaaacaacaacttcaaactgacctcaaatatctgttacaaaagttctgaatccacagaggatttaacttaactaggcgggatagaatataatttaggatcatagttaacaaatgaaagagacacctttgtctttctatccgaaagctcatttaaacctcggtatatatgtaaacattactttgacctccttcacaatgttgagcagattacgtgtgttttgaaggattggttttagggctggccattcttcatctgcatttagcatcgttacaaagctcattggaattcgaggatgactatttgtgttgaagttggctacggttcccacttgccttttatctctctgattaaattgcccattcacgaggtatt

SEQ ID NO: 27365 - DNA, 492 bp, Arabidopsis thaliana
cgtcttccttttcagagttcaatcacacaacacctctcttcaatagcaataaccatggctcacactctcggtctcactcaacccaactccactgagcctcacaaggtttgtttccttcactgtgattttgaaatgattttgtatggaatccagttttgatttagttcaaagttttgattttttgattgattcgagtttgaagttttgatcttttggtgacgattatgcagatctcgttcactgcgaaggagatcgatgtaattgaatggaaaggagacatactcgtagttggtgtgacagagaaggacttagccaaagacggtaactcaaagtttgagaatccgatcttgagcaaggtcgatgctcacttaagtggacttttagctcaagtctcttccgaggaagatttcactgggaaacttggtcaatcgactgttctcaggcttccgggtttaggatcaaagagaatcgctttgatcggtcttggacagt

SEQ ID NO: 27366 - DNA, 605 bp, Arabidopsis thaliana columbia
gagaatatagacatgaggtgagtctggtggccacaaaactggattttaatagatgtattatgttaatgatactatgagctcatcttctttattcttttcttacaaatataatggttataattcattgcattctttatgtcaactcaaaacatttttgtaggggctgttaatttgtaaatgataacatccttacttcgttcttgcaggttcttcggttacttgttaatgtgtaccagaagctggcttctcctgattatttgagcatttgccaatgccttatgttcttggatgaaccacaaggcgttgcaagcatattggagaagcttcttcgttcagagaacaaagatgatgctttattggctttccaaatctctttcgatcttgtacagaatgagcaccaggcattcctcatgagtgttagagatcgccttccagcgcccaagacccgtcctgtagaagcaattcaagctgttgaaactctactgctcagaatgagaacactgcaggggatgttcagatggcggatgaaactccatctcagacaattgtgcatgaaacagatcgtgttgctgctgtgtacgctgagaggttacaaaggctaaggg

SEQ ID NO: 27367 - DNA, 392 bp, Arabidopsis thaliana columbia
tccatatcaacactataaccatcaccatgaaagtgtatttgatgtaaatttcctgtggtcatgtatcttttgcaatccttagctttttgccggtttagctcaatttctttgtctgctctaggtgtaaccttttttccacctgttggttaaaatagtcctcttggcattcctctccatgcacttccttctaacattcgttaacatgtcaagcaaaggtttcccccttgactctctaacgtttctgttgaaagattctgataggttgtttaggttatcgttgcaacaagatccaagtttaaagaaagctcgagaccatgattccggtgatgtacgttatagtgtatcaaacgatcctttgttgtatttcttcaatgcttctaagttatcagtaa

SEQ ID NO: 27368 - DNA, 435 bp, Arabidopsis thaliana columbia
ctttggtgtgtggtaacacgcggccttcgacttgagtgaagtcagagccaatcctaacaccacattcttgcaacattgggtcatcattatagttactagtcttgagagcctgcaaaacatggaacttagtatacataaaagtgcaaatgaaaagaggatagatggaaaatttgaagtccttactctggttagcacacgaattctttgttgtggattctgccttgattctttgataaggttactcctctggaatttggttagcgctttagtatagcgttgtagagatacaagctcacagagctgcaaaatgttttataaaacaaaagatgggaaagtatcataagtgtcataagccattaaacatgagattatgtgggagaggaacaaaacagaaaacagatattacctcaatgggaaagtgggtaggacgatttg

SEQ ID NO: 27369 - DNA, 524 bp, Arabidopsis thaliana columbia
gatcccctgatcatgaccggagcgacgagaccagatctcggtgttgatcacgggtcaaaaactcgagaagatccgacgcgtgatcagcgcttgagtttaaatcgggtccgtagagataacggagagaatcgatgccggcgtagtaagggaggtagattgcggaggcgagattcgggtcgggtgtgagacatggatattcgagaatccgacggtggaaaatgagttcgagaagtaacgggtcggttcgataccagcttcgggtacgggtatgggtttttgggccgagtccgtgattggctaagtaagggcaaagatcgtcggtgattgggtaacgattacaagttgagagaagatcgagattgaatcgtgatgggagtgttcggatgtgaatccaacggttggtgcattctgaatcaacggctgagatttgctgagactgaaccttaggctcgatgaagacgaagaagacgaagaagaagatggtcaatgttgtgacggtggatttggaaccattgttatggatg

SEQ ID NO: 27370 - DNA, 520 bp, Arabidopsis thaliana
tgcgtcgcttgtgccgcttttcaagggcataagcgttgagtccaagtccaaaggtatcatgacgtcagacgctgagctttggaacggacgtttcgcgatgctcggtttggtcgcgttggcgttcactgagttcgtcaaaggtgggacactcgtctaaggaaaagagagcacgttatggggaggatgttttaatacgattttgcccatgtaatttctctgtaaagtaatctgtgttaggcctactgtgtgttttatacatgtgtactaagtgacattttgaaacttcgggttaaaaacactttaaaattagtggtgttctataaagctctacgccttccaaaaactttcagaaattataaccatacaatatgtgacttacaaggccaaattatattaatggcctgtcatcataattgcgaacctaacaaataacaatacacgatttcacctactatcgagttttacatttaatgctcatcttataaaaagagaaaaagaaaaaaaatgttaagaaaattca

SEQ ID NO: 27371 - DNA, 472 bp, Arabidopsis thaliana columbia
tcagaggatcacaggatccccctaagaagcagagtctttgtatatctaattccaaatcacaatatctataatctctaagcctttgacattattcattcacagaagtttcataatcagtttccaaaaactccaagctcgaatcagaccttagtttcaggattcgcgatgccacgctcgaagaagatcggagcagaatgagcgaaaactcttctgaatccttgcaatttcgcgattctgaaattctccaaatctgggaatgtactcctcgcgcttctctctattataagaacaaaagcaatcaatcattctcgaggatcaattatacacaaacgaaggagaaggagctgaaatgtgtacgaaccggagagaagagaaccgaatccagtgatcgagatccgattatccgatgagagaagcttctcgaaatcggattcatcttccaattccatcacctgagacatagcctcaattg

SEQ ID NO: 27372 - DNA, 521 bp, Arabidopsis thaliana columbia
tctgtcaagcaagtgattcaaagctactccaagcaaaacggtgtagttatgggtcaaaaggggaagaagaaggtggatgtggcggagagtttagcggcggaagaagctggaaaactaacggcggagtttctcgccggagaattgatcaagggagacgaagaagagatggttaaagcattagtggagattcgaattctcaccaagacgagtactttttacagatcgtgtttagtggaagctggagttgttgaatcgttgatgaagattcttcgttcggatgatccgaggatccaagagaacgccatggctgggattatgaatttatcgaaagatatcgccggaaaaactcgaatcgtcggagaagacggtggtggattaaggctaatcgttgaggttttaaacgatggtgcgagaagagagagcagacaatacgcagcagctgctctgttttatctatcttctctcggagattacagcagattgatcggagaaatctctgatgcgattccgggattggtgag

SEQ ID NO: 27373 - DNA, 479 bp, Arabidopsis thaliana columbia
tttcaacttagtgcctgatagtttgaagcagtctttccaaaaggaactcaaaaacgtgttatccctatcagaaactatcgatgcagggaacccgtgcagcttcactacctcgtgaataaaaattctagccacatcaactgcattgaaaggatgtttgagaccaatgagatgaccatatttgcttaatctgtctaccaccaccaaaatgacatttacttccgtgagaaccaggcagcccttcaacaaagtccaaggaaatgtcttcccaaacctgcgttggaattggtaaaggttgtaacaacccagccggagataaggtggagtatttctgtcgttgacacatttcacacttagcaacaaatttctgaatatccttcatcataccttcccaatgaaatgattgttgaatacgtttcattgtcttcaacacacccggatgaccacccaacaggccactatgatattcagcaagtatgagt

SEQ ID NO: 27374 - DNA, 489 bp, Arabidopsis thaliana
cattatatatatgataacactttattaaatttcaatacataacataattttgtaacgatcatatctaaaataaattgtagtctctctactcccctaaaagaaccttgtcaacgaccatctgaaaatttagttccgacgaaccataaataggcttcgtcgcttcctcagccaagcgctgccactcttcggccttttgcctcattttctttcctttgtctccgtccatgagttctctaaccaactcctcaacctcctccctcctcacatctccaccgatctccatccccacttcccattcatcacaacaatatttacaatttgtttgctgttccgcaaagaacggccaacacaccattggaactccaccggagagactctccaaagtcgaattccatccactatgcgttaagaaccctccaactgccggatgagaaagaactttttcttgaggacaccaactcgctagcatccttcggttagcgtctctat

SEQ ID NO: 27375 - DNA, 486 bp, Arabidopsis thaliana
gaggatccctgttttgagcgcaaaacagcttgtggagtttgcatggggtttggctgcaacggggaaagagtttttgtgggtgatccggccggatttagtagccggggatgaggcaatggttccaccggagtttttaacggctacggcggaccggaggatgttggcaagtttggtgtcctcaagagaaagtcctttctcatccggccattggagggttcttgacgcattgcgggctggaactcgacgttggaaagtctatgcggtggagttccaatggtgtgttggccgttttgtgcagagcacaaactaattgtaagttttctcgtgacgaatgggaggttgggattgagattggtggagatgtgaagagagaagaggttgaggcggtggttagggagttgatggatgcagagaagggaaagaatatgagagagaaggcggaagagtggcggcgcttgcgaatgaagcgacggagcataagcatgg

SEQ ID NO: 27376 - DNA, 471 bp, Arabidopsis thaliana columbia
aaagtgcattgcgcaggccatagaccacgatgtacatgcccagtgagaaaataacgatctgccatggcgcaccgcgaggacttttccggtgttgatcgaatgacctcttttcgccaccacaaacagcactgctgcgccacggccagctatcgcactgaccaggattccctgcggctccagaaagaagaaaccgacaagcagcaataacaggacaatccagcccgccctgaaggttgccagatccttgatcgcactggcaggcgtcttcagtatcgaaacttaatacgttgccggaataactctgcgaaacaagagatacagcataatcagcgtggccgcaatcgctgccgcatccacggagatcataacggaggcgtactgcgcaaagctcagaccgaagaagtccgccgagacgatattcccaggttagaaacaatgagcggcaggctggccgtatctgcaataaatcct

SEQ ID NO: 27377 - DNA, 505 bp, Arabidopsis thaliana columbia
tgcaatgaccccaaagcttcttacaaatctcctgtaataaccagctagcccacaaatactcttaactgtttgagtgttgttgggtttggccattccaagactgccttaatctttgtaggatctgtctcaattccctttccactaataaaatgtcccaagtactccaccttagaaacagcaaatgcacatttactaagctaagcaaacagtttattagatctcatgacctcaaaaacttgctgaagatgttgtacatgctcttccatcgatgaactataaataagtatatcatcgaaaaaaaacaagacaaacttcctcagaaaaggcttgaatatagcattcataagaccttgaaacgtagcaggggcattagtgaggccaaaaggcatcaccaaatactcatagtgcccgctatgagttttaaaagttggtttgtgaatatcctcagtagccatccgtacttgatgataaccggctcgaagatcaatcttagaaaataccacag

SEQ ID NO: 27378 - DNA, 618 bp, Arabidopsis thaliana columbia
tctgcaagacagaggtgtgtgagcttcatttgtttacatttttaatgaaaatcaattcgttttacatgaaaagccttatcaatctttcttgaaaggacattcaggcctatgacgaataggtaggggcttagggagcagccttgtcgaagccctctctagctattaaaataacatgagagttcaccgtttacttgaactgagaaagatgttgagctgacacaggtttgtatccaatctacatactactctgggaaatcgagagctcgcaacgttttgaacaaaaaacccccattgaacagaatcaaatgctttagagatgtctatcttcatagcacaatgtggagagacagaatctttgttgtaatctttaattacttctgtggcaagcaaaaggttctccattagcaatcagtctttgatgaaggccgattggtttggagctatgaactttagaagaatggtctttagctggattgcgagaatcttggatatgaccttatatataacattgtagcaagatattggcctgtagtctttcattacttttgcttcattcttttttggtataaagctaggatagttgaatttctccttttggtagaaaccccatcttgaaaa

SEQ ID NO: 27379 - DNA, 581 bp, Arabidopsis thaliana columbia
  unsure (1)..(581): unsure at all n locations
cattgaatttcgtttattagaagtttggtgtattcttgttttcaatccaaatggttacagaaaagggtgtttaatgattcagtgtcgcatgcacccatttaacctttcttttatcccatgaatatgattttttcagtgtttttatcagaaaatgacatttgatagttgtggctattacagggcgttatgactcccgatgaaatggatctcctcgttgagcaagttaagatgcttgctggtgagatagctttcggcacaagcacactaaagcgtttggtggatcagtccatgaatgatcctgaaaactcgaaaacccaagtaaagattcttctttatctatctagagaattatataccagtatgactgtggtctccctaatttcaagttttaaccctgaaaatcagaaaatgcatctccagatgctgaactttattagcattccactttaagccatttatttacgtataagcataactacggaacttattatatgctggcatgcagatccagaatctagaaaatgatatcaaganaagcaaagacaaatgagatccttggacagagaatactgagagtggtg

SEQ ID NO: 27380 - DNA, 510 bp, Arabidopsis thaliana columbia
  unsure (1)..(510): unsure at all n locations
ggatcacaagaatctatcaaaacaacgtcaaatgtatgaacctatgaacaaagatgatggcaaaatcgtaaatgtaggttcatctatgttatcttccgattacggacctgagattcgacaccagcaccaacagcgtaaatggcccaatgacgagtgtagttgttgaagagatggacttttgcgaacgannacgcgagggtgtcgctgacgtgtaccgtcgaagaagcagtgatgtatcgtaactcttatgcatcggtccgtaacgtgacttgtgtccgctcctattaacatagttttgttgtggttcatgaaatggcatctgaaatatttgtttgaaacataaaaacatgaacacaatgggtagtcatagtatatgtaatctgtaaaaaaaatcatgtttaaaacgatttttagaatatcttttcaatacaaacatagactcaaaacaatataagatttaacttacttagtaccataaaagatttaagagacaaaccttgagacagtgat

SEQ ID NO: 27381 - DNA, 425 bp, Arabidopsis thaliana columbia
attatgtttccaaagtataataagcttatgtgaaatattgagaagacagtttgaatccttagatgcctcaagtacctgtatctttggaaagctctggtttataccttgcagttctgtatttctggacaagccaataatataaagacgtttaagatgagctgtaagcatacaaaccgaaaacatagatggagaatagtatgccgcaaatggcttttgacatgataaacggtcaacccagggctattgatgagcttcaaaacagccttaggggtggctcctgtggtttgaaattataagccaagagaataataataagttgttcagctaaattttgcaggcatgagaaggcagaaaaaagggcatacgcacgttcacgtacaccgagctgaatgatagcttcgacaaatgcttcatgaagttctggt

SEQ ID NO: 27382 - DNA, 544 bp, Arabidopsis thaliana
tacggcggcggatggagtagtgagctggcagaatgcgagacacaaggcggagatcctttcgcatcctctttacgagcagcttttgtcggcgcacgttgcttgtttgagaatcgcgactccggttgatcagcttccgagaatcgatgctcagcttgctcagtctcaacacgtcgtcgctaaatactcagctttaggcgccgccgctcaaggtctcgtcggcgacgataaagaacttgaccagttcatggtatataaatttcagatttttttgttctataattttataattaacgatttcataattatacttagcacaaattttaataatacacaccgacttaggtttcttgatttttgaaatcttaaaatattaaaatcaagatttgtgtttttagggataaacaagactaaaatcccaaaaaaagagcttatgatataataatggtcatgatgatgaagaaaatacaaattttgttctttgtgtttattgtgtgtttgattaatgttttttttatggtgtagcacattatgtgttgctactgtg

SEQ ID NO: 27383 - DNA, 596 bp, Arabidopsis thaliana
caacatagcctaatcacagtttatgattataataccatattcaacaataattacaatcatcatgttcacattataatatagtaatctggtagatcatcaaatgcttcttatatcaaaatgcagtcggttacttaaagctctcgcaagcgaaaaaaggaagtctctttactttataagataatggagacactaaagaaacagaatgcaatgatggatttctgataagataatacatcttttgttttaaaaatagaaaatgtgtttcttgtgaaatcttccatgctcatctaaaagtaaaagctttttttatatatataattttcatggggtgaagcttatcactttcaatgatatctgtttctctttgtcaactttggtaggttttgagcatgagccgacttggtggagccggtgcggttgctccacttgttactgatatgcctctttcatcatcagttgaggtaaaaactttttaagaacaaaaagtaaaaactttagtaatggggttttgattcagattttgctaaaatgcaataggatgaacgggtgagggtggaagacccgcaaccagcgtgggagaaatggtctacgatggg

SEQ ID NO: 27384 - DNA, 563 bp, Arabidopsis thaliana
ctaaagctgttgccaagccaggttcgcacccgccctggtccggcgttataagctgctgaggagaaaatacgattattgccaaactgctgataaacatattgcaggtaactggtgccaatgttgatattcgtttccggatccagcaattgcccaggactgctataaccgggaatagagaacatcttcaccgtatgggtcgctgtaccaggcataatctgcatcaagccgctggcccctaccggtgatttcactttcggattccaggcgctctcctgacgagcaatcgccatcgcatagctttgcgggatctccttaccgctggtgtagcgtttgaaaagatcgttgtaagccagcgggaatcgctcttccagatgatcccacagcttcccggcgatcgttgcctgaacgctaagatcccaccattggttgttgaaagcataccgcgccagttgagcctgctctgtttttgacttgctcttcaccagattggcccactcgctacgcgcggtattatcgagattccagtacatcaactcgcgcacgccgccgatctccggcccctg

SEQ ID NO: 27385 - DNA, 466 bp, Arabidopsis thaliana columbia
aggatatgtaagttcttttctttctcttcatcgttccattcggcgagataatagtcttcttcagttacttttttggaagagggtccacaaaacatacctccccattgcggaaagtaaatcaagcatattggtaatgaacatgcgattgacattacccccattagagttatacccgtctctctcgtgtatgtcgatcctttgaagaatatcaactgtgttaagaccgcgcctacattgcctcccgcaccagtcattcccgataccaccccaagagatctgcataaacaaacttttgtaagcaaaaatgttgaataaccaatcaagcaactcaataccaaaatgtatgttaccttctagaaataaagggaacaacgccaaaggtaagtccacaagcggcttggacgaatacagagaagacaagcataacaattatagacactgtcaaggaagacatctggccagacat

SEQ ID NO: 27386 - DNA, 324 bp, Arabidopsis thaliana columbia
ctctaaagctgagaaaaacaaaactttataatgcaaaattcaaaaatgccaagttacataaatcaatcgaattggtacataaattctcaaaccccaacacagaaatcgacaaaaaaaaaaaactcactcgaaaccacgttgttgtcgcatcttacacgaagtagaaactaatcgacgagaagggagatagaaaaatcgacgagaacttccatgttctctctcgcaggagattcctgctaatccatgggttaagaaacagaagctcgatagcttcgtcgtcatgtttaattagatacctaaacgaagaaagctacaaaagttgct

SEQ ID NO: 27387 - DNA, 616 bp, Arabidopsis thaliana columbia
caagtttaaaacaacaaaaagaaaagctttttaaagctccacaaacaaacaaagaaacacagtttaaagataaacgcatacaaacttagaacacaaaccaaatcaagagtttagaaatgatgattgttaaaacccggccacaccatgttggtattagacgtcgtcgcatcaccattgttttctccagcggttgttacattaggatatggttcttggcgaacaccatcattagccgttatagtgttgttgctcatgtaaaattgtgagttgttaatgttgattccttcgtttattcccagctcacttctcatgtaatcaaaaggatcttggcttggttgattcatagccattgttggattattgatcatgctgtgatgttgtaaaggttgggagactgacccagccaaaccttgggaagtcatcatttggagacgaaatggatccatttccaaatgagggtttccgttgctactgcttccttgataaagacgatagcttttagggtttggatttccgtctccatttgttgcggtattcatatttaggtggactaggtggaaaaaccattcatcaaaaaagtaatacttttctctgcttaaatatatcggtgttgatg

SEQ ID NO: 27388 - DNA, 531 bp, Arabidopsis thaliana columbia
aaagattgacacaaaaagaaacgcatggattaactgaaagaagtgcacaaattggcagagagctaagtttagtacagatcaaagtcaatagatcctctgtacctcttctttttctttcttcttctgctctatcttcactagtagaatcagaagaaccaaatgtttcatcattgaatgaatctctagcgtcacgtctagtgaaaggtggcgcctacaaatgtacatgagagatttatgaatctatgccgttaaatcattcaaatacacctcacaaaccagctgatgaaacccagtaacgtgatggagcagtattcaagaatcaatggtaccagagactattcaagatgactacagcagatatttgggtacttaaccttgtatgggcgaggaggatggtaaggttcattggttctactcagctgatgtgagtcattagattgaggtctaggggcagatgtcccgcaccaaatccagaaggcttagggaaagaactttcccaagaagtccatcatgctcaggtgcttgctaaga

SEQ ID NO: 27389 - DNA, 542 bp, Arabidopsis thaliana columbia
ttgagataaatgcatatatctttggagccggtatcaatggtaaccatcacagagttcccttatacagctgcaagatataaaagtaagtgacagaaaatttgcatcaaaaggtctcacaacacaaaattattaacatcaatgactaactttgtttattatctgcagggaatcgatgtttgggaagagaagaagtaccaccttacatgttacctgttaaccccggtggcgtcttaacgctcataagtacttcatccttacctccagcccaagatccaaacccgattttcacacacgatgatgtcactgagccaccactacctccagttatagcaaaatccccaacctcaactcttggaacaccatcaaccattgcaaaacctctaagtttgttcattacttttcttttgcttctagatcaagtttggttccattctgacaatttctttttgttgaatggttgtacaggaaattttctcacagtaattcgcataggtgagttatgctggcctgagaaattttatactgattttttttccaagatt

SEQ ID NO: 27390 - DNA, 444 bp, Arabidopsis thaliana columbia
  unsure (1)..(444): unsure at all n locations
ctnnnnnnnnnnnnnnnnnnnnnnnctaaagtcattgagatgggaaacattccctttcatgttgctgaagcagaacaggaattacaggaacgcccgctgaccgaatattccggtgccgggctggcgctacgaaactgggggctcgggctgaaacaggtcgtgatggcatcactgtttgtcgccctgtttcccccctttggcggcgcgcaagacctttctctcgcctgcctgctgacttcacttgtcgttacgctgctcaaggttttgctgatttttgtactggcctcaatcgcagaaaacacgctggcacgcgggcctttttcactcattcaccatgtgacctggcttggcttcagccttgctgcgcttgcatgggtcttctggttaaccggtctgtaaggagcactgacggaatatggaaaatcttgctctgacgacgttatt

SEQ ID NO: 27391 - DNA, 521 bp, Arabidopsis thaliana columbia
gcatgagtttttgaccgggtaggactgccatgagtacccaaaaaattataagaagttggacattttgaagtttgttgaaaagatgtttaagaggactgggatatcaaaataaaagacgtggaagtgaattgatggaagagttcaaaagtgagacgtctgtggctaggataaagttgacaatcttgttatttttatccaaggttgtgagagtagattcgaaaggtgatgcaaagatagaggacttactattaaggattgttgataatgtgaaatcttgtgagacattcccgtgaggacgattttcatttgagcagtgtatgaaaggggtccggatagtgatgaagaacatgaaaggggtggtgaaaccaaaagcacagactaccttttatggattcatttctccacttgacgttatgagactagtaaagtataaaaatgaacaattttgaagtgttgttgctgcattaagtgtgcgtgattgtgaatgtgtagattctagcatttaagtgcatcccccagct

SEQ ID NO: 27392 - DNA, 603 bp, Arabidopsis thaliana columbia
cgaacaatgaagatgtgtcaaggcgtcttaaaggaaatagaaagtcgttctgatgataaatatgtttcttatcggaaggtatagctttcttattctttaacaggaatccatcagtatatttacgatttgtttgttaatctgctctgttactgcttttttgtcaagtagggccttggtgttgtgtgcaacaaagaaggtggttttggagaagaagattttgttgttgaatttcttggagaggtgggtctttagctttgcaattttatgtttgtcagttactcagctgcagcagaaacattttctgaagttcactaggcgcactatgcttaaatattgaacatttctcttaaaggaggctctgaacagagattctgacttgttttggatattttaggtttatcctgtttggaagtggtttgagaagcaagatgggatccgttccttacaggaaaacaaaactgatcctgcaccagagttctacaatatatatcttgagagaccaaaggtatggagaaaatatgatgtctgggcatgtatttaatatcttagaccattttcttactttttatgatgcacggcagggtgatgctgatggatatgatt

SEQ ID NO: 27393 - DNA, 627 bp, Arabidopsis thaliana columbia
tacaaagttgaagaaaacatccgtgatattctcgactctgctattgaagacataaagaaattcgctgatgctgttgtgatccaaaaattatcagtctttcctgtcgctcagtcgttcatcacaacgcaaaccaatgttgtggagaagctgcagaagtctcagctcccagtttatgtggaactgtttcagaatgagtttttatctcaaccatatgacttctttgctgatgcaaccgttgagataaactcttatatcactggagccggtataaatggaaccatcaccgagttcccttttacagctgcaagatacaaaagtaagtgagccaaattttgcaccaaaggtctcacaacacaaagttatttacatcaatgcctaactttttttctcttctgcagggaatctatgtttgggcagaaaagaaactataccttacatggcccctgcccaacccggtgccctcttaacccttgtgagtcctactgcctttcctccagccgaagctccaaacccggttttcacagatgctgatgtcactgagccaccactactccggttaccgcaaaagccccaacctcatcccctggaaccccatcaaccaatgcacaagcacctagtggacaaacc

SEQ ID NO: 27394 - DNA, 464 bp, Arabidopsis thaliana columbia
  unsure (1)..(464): unsure at all n locations
nnnnnnnnnnnnnnnnnnnnnnnnnnctaaagggcggtatagcgacctcttcttcagcttcggcgcggcggcgatactgatgcgtccgtgtcatcgactgcacctccagggaatgccacttgtccagcgtgtttacgcagatgaatcgaacgctgagtcagcaacaaccccggttgcggtcgacggacgatggggattaacacagcagcctgacgatgatttagggtttcccggttaaattgcgggcgcaaaaattgaaagcgcgataaaaaatcatcaagcgtcaggctacggtattccacgtcttacttctccagttgcttcaggatacgattaactttatcaaaagtctcctgatattccgcttcttcctggctatcggcgacaattccaccgcccgcagagcagaaaatttgtccgttaatggcagtcagcgtgcggatagtaatactggtacccatgtt

SEQ ID NO: 27395 - DNA, 427 bp, Arabidopsis thaliana columbia
cgaacatcatcctcggggatgaataccgagtaggttgtgtagttcttgggtagatgccacgtgtattgcgtgtaggctgaacccggatggaagaagaccggtatacaaccggcaagcattgagtcaaatgccgatcttcgggtgtaagagtctccctgtggctgcaggcagaagagagagctttgaaacatttgcataatgctgcttggtgcatggcatttgctctccccaaaatcgcattctaataatttgccaacatttgagtttcgacattgatcaatgatctgccctctgatagatttcggattgtcaggtcgtggggctcctgcaaacgagaaaagccacttcctttccaggtttctcatccggtcttgccattcaaaaacctctgagtcctttgctgggtggaagtaggttgggtacggga

SEQ ID NO: 27396 - DNA, 452 bp, Arabidopsis thaliana columbia
aaggttttaaaaaaagaaattgaaaaaactgcccatcgccacgcgctttggcgtaccgaacaggttgcacagcaccggcattgagtagcctttagggttttcgaacaacagcgcaggcccaccggcacgcaaagtgcggtcagcaatttcagtgatttccagatgcggatccaccgggagcgtgatacgttttagctcaccctgctgttcaagcagcgtcaagaagtcgcgtaaatcgttatatttcatggcgtccattgtagcctcttaatctgcgcccattatacggcgttcatctttgcgatgctgtaaatttgttaaattagcgtgaactctgacggtataacgcaaaccgggggaatataattactttagcgtaaagcttttgctatccttgcgccccgattaaacggataagagtcattatgcaatcctggtatttactgtactgc

SEQ ID NO: 27397 - DNA, 627 bp, Arabidopsis thaliana columbia
tttttccaaatttttttatttcgggaaaataacaaaaaaagaaagaaataaaaagaggtgattcaaatccagagagttctcattatgtatattcaaaatctgaatcgagaaggaatctgactcgtgtagatgagaatcggcggcgtcgaggttacgaaatttgcgtcggagatgatgtcgtcgtcgtcttcgtcggcggtggagatgttgaatctcaaagaagcttcgaattggtggtcagacgtaaacgaatctccgatttggcaggatcgtatcttccatgttctcgctgttctctacggaatcgtttccctcgttgctgtggtacgtttcgtttctggatttgattgatgattcttcgatgaaattggtgtaacatcttatgtttgattttggtttagattcaacttgtgagaatacaattgagagttcctgaatatggttggacgacgcaaaaggtctttcactttctcaatttcgttgttaatggaggttagtgttgctgcggattttgatttcgtgtgttcatgttgattgattgattgatttggctcatcttgtatctggtagttcgtgctgtggtgtttgcttcaggcgaaatgttcagtttatgcaccagaggtttag

SEQ ID NO: 27398 - DNA, 356 bp, Arabidopsis thaliana columbia
gtgctctaaaggtcacctccaattttcatcttgatccctcatcaatgcagctcggcagcaacgtgccgtttcctcgccagctcactgtcactcgtgacggcgatattatgatcctccgcacgccgattatttctgagagttactcccccgacgaatcgcccagtagcgatgccaaaaatagtcaaaatatgttgggatatattgcgctggagctggatcttaaatcggttcgcttgcagcaatataaagagatctttatttccagcgtgatgatgctgttttgtatcggtattgcgcttatttttggctggcgcttaatgcgcgatgtaaccggtccgattcgcaacatggtgaat

SEQ ID NO: 27399 - DNA, 457 bp, Arabidopsis thaliana columbia
  unsure (1)..(457): unsure at all n locations
tagtaacgtccgccagtgtgctctgaatcatttcctccaaacccaaggatgagaagaagtcactcaaggatctcaccaccaagctcttcgataccatcgacaatgtaagtttctcatctaacttcgatcaccatctatcaagattttgtaatgtttcttgtttgtctgatcgaaagtttgtttatgattgattctccggcagctggattatgcggcgaagaagaagagtccttcgcaggctgagaagtactatgctgagacagtctctgctttgaacgaagttcttgccaagcttggttaagcattttaatttctgcatttttcttgtaaattattattcttggtttttgttcttgagtactttagacttcaattcgtgaatctgaatttatgtntcacgttttcaccaagtaatggcaatttcttgagtatgcgatagcgtttgtttgcatggtga

SEQ ID NO: 27400 - DNA, 528 bp, Arabidopsis thaliana columbia
catcttcgacaaagctgatttcgtactcgttaattccttccatgacctcgaccttcatgttagttcatttcctaactactctgtttttgccctagttactctgttctttttgacctagctaccctgtttttcccttagctactctgttttatcacctaatgactatttttctgtactctgatttccgtctacaggaagaggagttgttgtcgaaagtatgtcctgctgttgacaattggtccaactgttccatcaatgtacttagaccaacagatcaaatcagacaacgactatgatctgaacctctttgacttaaaagaagctgccttatgcactgactggctagacaagaggccagaaggatcggtagtatatatagcttttgggagcatggctaaactgagtagtgagcagatggaagagattgcttcggcgataagcaacttcagctacctctgggttgtcagagcttcagaggagtcaaagctcccaccagggtttcttgaaacagtggataaagacaagagc

SEQ ID NO: 27401 - DNA, 438 bp, Arabidopsis thaliana columbia
aattgatcacagcatgcatcactgcatccttgaaagagaaggcagtgctctttctgaaacaaaacttgcacgtgttgtcaaaaggatccaccaggaaatcaaccccttcagctctccaagaaacaaaaaaatcatcccgagaaaccaatgtcccaatctcaagtgtaatactagccaacttagacggtacagtcggtcttcttcgcagaggaagggaatatggattcttaggacccaaagtgacttttaacggctggccatccaagatgaggttgcattgccctgcagcatccatgagacgaccagctgagtcaaaaactgcgaaatggagaaaggcatgaggctccacttacttataagcagcgatactggggactatttgaagtgtctgcgatttcaaaattaggataagcccaggaggagtccacgaagttttta

SEQ ID NO: 27402 - DNA, 568 bp, Arabidopsis thaliana columbia
tgaagtttcttggggatatgaagaaatgttgtttctctgactagtggagccagcaaaagaactgttcggctctgatcttcccttgtccattgagaatgatgggattccactttcctctcgataatttgtaggctgtctgaagtcaatacccgacgtactgctgttgctgtccttctcgaccaccctcctcctggtttctggtacattcacttcctgtggaggctcaaagacatcttctacatcatttgggcccaacaaaggatccttattaaccggaggcattgaattcgcagtttgatctttcttgctatttccacttttagatagacttttgactctgtttattccatacataaccaacagaggttaatagacgatgaaattgagaatttgtttcacaagaggctatagtttgtacaaaacataccgatcagcatatcttagagtattgagggtatgtcacacgatcctgcatttggagagatgcaggaaatcatcaccgttcttgagttccaacaaatgagtcacggagcacttccgttagtttgctccacgaaatggtatatgt

SEQ ID NO: 27403 - DNA, 556 bp, Arabidopsis thaliana columbia
acgagtgagttccgattctaattcaaagttttttcgatagatttattgaatcatacacatcaatcttattattaagtttctgcactacaaagaattttactctgcattcatcatacatcctgagagagtcagagtagggtcttagtgttagaaatcacgacaatgagatatcctacaacaaccacataatcaaattgaaagctatacatgtgatctcgcgttgttttgacatatgagtcatggaaggaatgcgcttgtgctgtctctaggtggatcatgaccttgtgagacttcttgtgaatgagccttacctgggcaaagccaagacgatgggaatacttctttcttgattcaggatttgacgccttcctttcaccgacggcacccgagaaactcctgagttcgttaagccgcttcatcttctccttgttctgtttcttcttttggaagaagaggaagaatgaagccaacactttggtcccttgcttcccagatgatgatgatgatgatgaagaagaagctttccgaagttgcaaatgccggtaatggtgtctgg

SEQ ID NO: 27404 - DNA, 417 bp, Arabidopsis thaliana columbia
tgcgattgatgcggtgaagttttccacaagaagatatcatccccaatagcagttgtaggaggatcgtgagaagttagatatgatcggagtagtatgactaagggatgccttccacgaggaagaagccaactcccaacattagcagcatcagcaaccaccgcaagaaccctaataccagtgacacgcggaccagcaacaccaacaacatcaatgagcggtcctaagtctgtccaattatcatgctagaagagagtattatgacctgaaacaacagaacaaaaaatgaaagtcctagcaatagaccgccaatcccatgaatagtttaagtcgcttggcaaggattcgagaaataaccttatatattgtgttgcagcaagagataaggacaaaaatctccaagtttgtcagcagatgagg

SEQ ID NO: 27405 - DNA, 560 bp, Arabidopsis thaliana columbia
gttgatgagactagctggatgtgtagggatcacacctcctccaacaattgttcctttgatgagtgtgtcaagctcctcatctcctctaaccgccaactgcaaatgccttggagttatcctcttcactttcaaatccttgttagtgttttcggccaactgaagaacctcagtagttaggcattcaaggattgaagtcgtgtagacaacatcagtcgcaccaacagtaccatgtgcagaaactctggtcttaagttgcttgtgaatacgagccactggaaactgaaagaaacaaagaaacaatatcagtataaaatttcatcaaattagactacaaaaaatgaaatttctttgtttatttcaatttctagtgggtcgtattcacatacaactcaagactagagtatctacaacatggtctacttggtgctattgttgttgactacacgccttcaatcctaaagtgcctaatttcataggttattgagttacttagaaacacaagcaatgataagaaaatgaagaggattctccaatgcattgatagttggtgatgcaggaga

SEQ ID NO: 27406 - DNA, 574 bp, Arabidopsis thaliana
tctagaggatccatatttcctcttttttttcatctgatttgtctcaattgatggatactgcaagactcgaactccaagcaagttatcatcattcttcagtggaacacaagacaaatgtgcgacttgtaagaagacggtttacccacttgagaaagtaacaatggaaggagaaagttaccacaagacttgcttcaggtgcacacacagtggttgtcctttgactcactcttcttacgcttctcttaatggcgtcctctactgtaaagtccacttcaatcagctctttctcgagaaaggcagttacaatcacgtccatcaagccgctgctaaccaccgtcgatccgcctcttctggtggcgcttctcctccttctgatgatcacaaacctgacgacaccgcctcaattcccgaagcaaaagaagatgacgctgcccctgaagctgcaggagaagaggagcctgagccggtcgttgagtcttgaaaatgtcgtggaggaatgatcttatcagttctcaagtttgaagtttttatatgcgtttctgtttaatgaatatataaatacaaattgttgttg

SEQ ID NO: 27407 - DNA, 465 bp, Arabidopsis thaliana columbia
cgtttctttgagcgtcatctctctgaatctcttcgtcctgatggaagacaacttggaaaagctagagacaccattgttaatcttggtataaacaatgaagattgattctttttagtttttatcaaattaaaaatgtcaactttatagtggtttcttgtgtttgttgtaggacttgtttcaactgctgatgggtctgctcttgctaagattggttccactgtaagaacccgccttagtcgtttcgatagtattcacatgatcagcaatgttttgcttacatagttgtttcgtgtttatagactatgcttgctgctattagaatggaagttatgactccttctacggactctccagacgaaggatgcataggttgttatctcgttgtcttgttctctatgtggtttgttgttcttctttggtgattcattttgtgattcctttttggtagctattgagttccatatg

SEQ ID NO: 27408 - DNA, 479 bp, Arabidopsis thaliana
attcttgttgatttcgccttgcagcaagctcttgctgcttcataagttccgcgtaagtaagctttggagatactcatcctgaagcaaaatgaaaatactgtatcaagattcttgaaacatatccagaagtacgaagctactgtgggagtctaaatagatataaaggatttgtccccaaaagcatgccttcaaatccttctcatctccatttccaatggctgatttcttgtcatctgaaagttttgctgctgctcctgccccaccatcaacctttgcttcctgtctcatctctcctctttgttcctcggtcagattcattcctgccttgatcatccatggaggcaagactttcagactggagtctccactttagatttacatcttcgtttcatcactaggttaactcaacataaccatgtaagatttagaaatcacaatcacaatgaaggaggaatagtcaggaaaatttcagatgtata

SEQ ID NO: 27409 - DNA, 492 bp, Arabidopsis thaliana
cttcgcaaagttcggtcgacaatgttgcttcagctactttcaaagtcgaggctaatcactttgtcgcttttggtatcagcatccgagtacgtataacaattgtagatattcaaatttgttttccttttaattacgtcaactaatgacttggtgtgatgcacatatagaatgatgcacctgtcggaatggcattcacatctgagaaccaatcggtggcagcgtttgtggctgctgacaaagtagcgttttaccattgtgcgttctacagcttacacaacactttgtttgataacaaaggtagacattactaccatgagtgttacatccaaggctccatagacttcatcttcggtcgcgcaacttccattttcaacgtacgtttctcctctttatacacattatctaacccatagcatcacagaccactcatcgcaaatctcgtcacagaattgtgagacatttgtgatatcagcaagagggtgaaccgtatgg

SEQ ID NO: 27410 - DNA, 565 bp, Arabidopsis thaliana columbia
catcaagaccctgtgtatcatccactgcttcgtcagcatcgtaagaaaacgagttcctaccgagatcatcatccatttcactaacagtgcacgttgcaaggcaagatatgtctccatcatgcacattcgagtccttatcagtatcatctctaacaacctgtttagccttgagctcttccacctgtcggaagtactcgtctttactcatcgcttcccgttcctgaccatcagacccttgcctaggtgagttctcataatcaggaataacttctggtggttcgctggtttctccatctttgtcttccagtttgtaagcttgttggttttcatctgaagctacaatatcatgctccatgagtatcctagcctgtatatgaaccaagaagccaacacacatttagaaactcatagattacactaaatgataaggtctagccacttgattacactaactcttccaaatttcaagcaaaccaagcatttttcattcagaggtttctcatatttgtgcatcaaacaatgaaataactaacacaatcagtaacaatcataatctcacctgacc

SEQ ID NO: 27411 - DNA, 577 bp, Arabidopsis thaliana columbia
aatgcatcagccatggagataacttgataactcaactccttatgagctttttgaatcactgtctcttgtgcatagaacaacatgtaacactcacatcctctcaccacttcttcttcaacctcattgatccatgcatcatcacatctataccacaaccctttaagcctcagatacgtcacatagtgacctgattccaacatccccttgtgtgtcacaaccgcaaatatctcaaactccgctgatggagatgatgatgacgaactgtcatactcaccttctccatcaaaggcaaatattctgttcccaaaccgctttccgatgatggaggaagagaggtaaggagacatgtttaggcggaacggatactgcaagtagctatcaatttttctcgaggttttacgggtaagagaatgttcgaaacgctttacgtgcaagcaaagaagcagaggaagtcttcttatagacatttgtttcgaagattctctcttttctccacagctttggcagtttagtttctggtctggaccgagtttctctgccgtgtgaagaaactaagcacccgagagagttggcatga

SEQ ID NO: 27412 - DNA, 544 bp, Arabidopsis thaliana columbia
caaacaatgtaaaaactaagggaaaaattattcgattttctctaacctgcttcttaagaactgcaagactctttgtgtgcataggggattgtggaatgaccccattcgaaggaggaagtccaagtaggccacagattagtgtctacaaccatttagaaatgaattagtatttgattcatacaaatgcagcagctaaagaatacagaagtcgcaagccatcatcataaccataccatgattcctaaaataaagatatcatagtgataagccgtcggatttttgagattgaactccttttgctgagccatttgtgcagatacacagtgatcaaagaagtataggccagcgatcatgattgctggtataaatgcagcaaggatgtaaagaggcgggaccttcgccatatcctgcaaatttagtccaaaagcaatgattggagtttctctgttgtaaagtgtcacaatcacaaatcataaggtaggtaatagtaatagtacgttgacgactgtccagtgatacaaggactcggatgcctaaggaagtg

SEQ ID NO: 27413 - DNA, 486 bp, Arabidopsis thaliana columbia
tcacaaagtaagaaaacgtcatcacaccattaccatcataaactaagttttaataagaaacacctagacaacgccaaatttcatagtcatgaggaacaaatccaacgagatcagaccactcgaccgttccatggatttctactccactcctctccaacacgatcatctcacaccaaatcctcttctcggttcttccactaataatttctctcgtgttatttccccacagaaacccaagtttcccattgcaatccaccatcccaaccatgtcaattgatttataatcaagcttattcaaacctttaacctctctccataccttatctttagggtcataccacattaccccaagattaatgtaataaacatagatcacactgtttaccacacacactccacctctcctccatgcctttccatctgccatcaaaaaagtctcacattttccatctttcgtatcgtagattatgtgactcccatctttat

SEQ ID NO: 27414 - DNA, 435 bp, Arabidopsis thaliana columbia
tgataagacaatatatataacataaatacacataacataactagtagctggaatagctcagctggttagagcgtgtggctgtaaaccacaaggtcggaggttcgaaccctccattctagcgatcgggattacaatatcatccacttgaagggctaattcgccattttcgcgtgcatactagcaccatcctccgtatcatctacatccgaatctgaggttcctgctgttatcagacagcccgactcatgggtatccctgtagccgtcatgaacctagcgcctaatttggcgcatcaccatatgagatcgaagccacaatgtccgagtagcactctccgtcttctgtatcgctcttctgtgcctaaacttatgaagtcttgaaacagcagtgcgagcaataaggtcacaggccggcaaagcatccaatgttgacatc

SEQ ID NO: 27415 - DNA, 354 bp, Arabidopsis thaliana columbia
ccaagccgtttttcgaggttcaaggaaaggatattcaagaactcactaatggaatcgagatccgtagagtgaagccgagtggagataactgtttggctgaagagagtaggatcatcttcagtaatggaaagattcttcaagacatgattctccagctgagatatgtagagagtgctgaggttgagataccaatcgagtggatcaatgttactggttcaagcgatttttgaaggagaaatgtatatagaagtttttgatatctgtttcttctgatttgtaatacggcagcgacgatgtcatatactcatatctagctcagaatgttgcaacttccatatgcacacacaaataggg

SEQ ID NO: 27416 - DNA, 560 bp, Arabidopsis thaliana columbia
cgatatcattactattcaatatttaatttacctcatacacttacggatatccagatttttcgaatcaaatcgaaccgaataacggatcaaatcgaaactaacaaatattttgccaagcacgaatctttagttcgcgaatttaagctcctggttactttcttctagggttttctataattatgattcctctcgtctattctagtccttaattagtcgccgacgacaaaaagaaaaaaaaaaacctagaaagcttgacaaacaaggaacgacgcatatctccaaacaatcagtgtaatttctgtgattctctgtttccttttgttgtgtctttgattcggatatttgtttatcctcaagtctttcatcgtttggttttgtagtgttgacatggacatcatcagtcaatgtccggatcacttgctcttgcgaatactgtcatttattccgacaaaagatgtcatcgtcacgagtcttttgtccaaaagatggggatctctttggagatgggtcccaaacttgaatatgattttcaagacaaatcatgagattcgtgaagtttg

SEQ ID NO: 27417 - DNA, 971 bp, Arabidopsis thaliana
tgtggaaacgcttttgtgtgctttttacctgtttcttggtcagaagtcacagcagcagttaacccaacaccggaagaaccacggcctgtggttgatatagccaaaggtgcaatattcattatcgctctcagaagttgagatttggcaacagatggatcaccaaccatcatcatgttgatgtctctgaaagcacaagatttgttttcaagtgaagaaagaaaaatgagttagacaaaaagtatccaatgagtcgaatctgaaatctgttttcaagcaagacttaccccctcaagtgggttccgttcttcaggttcttttcaacaccaccaagcatcagtaaaactactgctttctttatccaagcgtgcccataaatagaaggtgctaaggaacgagcaaggagatcaaatgcatcatctcttcgtgcaatatttttaatgttatctaggtcttgcttagtgtatataggtgcatttgcttctttattgagcagacgatattattggctatgaggatagtcctacacagaaagaactcggtcaagactatcagagtgaaaacatcttgaactaacagatgtgtaagaaaacgcacctaaagactccatttacactacccttgctttttccaggaagagctttgtaaataccgaaaacagatactcgatctcctggcttgcatgagtcaacaaggtcatcctcagcaatgacatcaacgcttcgtggaagctgaccaggagcagcattttcaggcacttcttgaattgacaaggtctggtgatctttgtatttgcacagcccatactcagtcaccaataagtttcccttatcatcctgaacaaaaaaaaactcaatcttcagtaagaggcaaatcttccagcagtacaggtaaatgaacaaaacggaaacaaaaaacatgtaattacccttgtgggatagacagagccagtgggtaaacagcgtgagatgtta

SEQ ID NO: 27418 - DNA, 537 bp, Arabidopsis thaliana columbia
  unsure (1)..(537): unsure at all n locations
ctnnnnnnnnnnnnnnnnnnnnnnnctaaagaataagcgcatccgctaccacctgcccttccggctccagtgtaatgacctggcttaagatgccgcttttaccgtttaattgctgcaactgactggtaatagttaacaggtcacttaataccgctgggcgacgatagttaatattgatattgaccacgacgaaggcgatgttatgggccgtcatccactgaaaactgtcgctattttccaacccatcccagcgggcttcttcgagaaattcaaggtagcgggcgttgttgacgtgctggtaaacgtcgagatgatatccacgaactttgatttgtgtttgcatagcgcaataaccttacgttgttgttataagtacagaggtcataactggtatgacctcttcagtctggcaaaaaattgccactatgcaaattaattacagggttaataccgccagattacgttccaccagcgaattgcccatccccggcacctgctttagatccccacagtttaaacggaccgtactctcgcgat

SEQ ID NO: 27419 - DNA, 569 bp, Arabidopsis thaliana columbia
tgcgtctggaggttcctttggtgtcataagcatctggaatcttaacaaaaaaaggcttcagtcagtcattagggatgcacatgacagttctataatctcattgaactttttagccaatgagccggtgctaatgagtgcatcagcagataactcacttaaagtaagctaagattcctcttacccgttgaacctatttgcatccactttgccacatataatatttgttttatgcctcgttcctgtagatgtggatttttgacacaaatgatggtgatcctcgcctattacgcttccgatctgggcatagtgctcctcctctatgtatcaggtaattagcttgacgtccacatcatactgaattatctgattgcttccatttagcttttctttcgttattgtgagactttatacattttggtgtgtaagtagcatttatgatccctattcgttgttaaagtaattccatttatgatccctgccagttgactatctgtgtagtgatgaatatttgtgtttcttaataagagtatttacttcatggtggctatatcgagggcatgccaataaag

SEQ ID NO: 27420 - DNA, 709 bp, Arabidopsis thaliana
tgtaatttttttcaattttcctgcatagttgctgatcttgatttatttagttttacgtaaattaagatgtaactaaaaagaagattatgtctcatcttatagaatttcaaaaagcctgcttttggcaatagcctaacatacaaattgtggtctctcaactctgatgtcttgaggttgattcaagtctatgtggtctgagaccaaaccagtaaagattttctttctagccttgagtttgttctgcaggataagctatacaagctaagctaattctcacttggtttcccagaagataatatccccttgttcgccaaccaacccaagatctttgagccttctctcttggtaatactctaaaatgtcaagttcaagctctctatccttgaagatttggtcgatttgctgaagcactctcttctcaccaatccttatcttgagagccatttccaacctaggctcaagctttcctttgtccagaagcttctcatcctacaacagacgatgaagacgagtaagaaatgagtgttaagctgcaaagacagtacaagtaagagctcgaacatatatacctcttcaatggtcgtatcaaaaccagacagagcagatttgcaggcatctctgacaacacggcatatgagttcctcgtttgtacgacttacaggcaattcaagatgacccatatggtgttatgaagatagatctaataaga

SEQ ID NO: 27421 - DNA, 590 bp, Arabidopsis thaliana
gtctccatgttttgaacaaggcattggttaagctagagaactacggatcattctctctaaagaaccttggaaagcaacatatccttgtaaatggcggaaaactcgatagaggccagattgtaaccctcacatcgtgtagttcaatcaatgtaagcaccagcttatgctttgtacaagtgtgtttctgcatctttctatctataactagaaccgcccaaattttgcagattagaggaataacctttgtgttcaagattaacaaagaagcagtgggacaattcttgaagaacaacacacggaggaagagcgaggacgacaataaattcagatggtgtgaatagattctgtgaatacctttagctataccactctcttcatagtcttagtgacccatccgcatgatttaaatgtcccacctggcttagggttaggagtttaaacacctaataccaatggatgaatgatccatcgattatcttattttcggtttaattaaaacgtaattgatatttttcggtttaaaagtgatggtttagtcaaaccaggatttgagcgttaaaattaaaactgcgccacctattggctttttt

SEQ ID NO: 27422 - DNA, 604 bp, Arabidopsis thaliana columbia
  unsure (1)..(604): unsure at all n locations
aaaacttggccacgttgatgaaccaccacttgaaaaatcttgaagcctccatttacatcaaaacagtcaaaccaaattcgcaatctcacaagtttcccttccatcccaaacaacactttattatctcttgttatatataaatctcaaacaataacactaacatttctcaaaatcaagaaatatggccacaagagcttctacatctagcagagtctctccagctttcactttcctcgtcatcttcttcctcttatctctcactgcttcagtagaagctgctggtcgtggagttaacaatgacaagaaaggcggcggattaggagcttctttcatattcggagattctctagtcgatgccggaaataataattatctatcgacgttgtctagggctaatatgaagcctaatggtattgatttcaaagcctccggagaactcctaccggccggttcccaatggacggaccatcggtgatatcgttggtacgtaacaaaaatgaaaaaaagttctataacccatatatagtagaatgatatatgtggtatcattattagtctagagnatatgttcactaacacacctacacatggtatgtgacgttta

SEQ ID NO: 27423 - DNA, 432 bp, Arabidopsis thaliana columbia
aaatctgtacaatgtgtatgaagacattaatagtgtaagaggggaagccgatcttcctccaggcgctgctttaacctcgatgaccgaggatttcaatttctatcaaggaggaatcccggaggaaatcactaggcttccgaaactaaagatactttgggtgcccagagctacgttagaaggtagatttccaggagattggggttcatgtcaaaacttggagatggttaatttgggtcagaacttctttaaaggcgaaattcctgtcggtcttagtaaatgcaagaaccttcgtcttcttgatttgagctcgaataggcttactggggagcttctcaaagagatttcggtcccatgcatgagtgtctttcatgttggtggaaacagcttatcgggtgtcatcctgattttctcaacaataccacaagccattgt

SEQ ID NO: 27424 - DNA, 536 bp, Arabidopsis thaliana
caatgatctctctggaagtatacctgaatactttgcaagcttttccaagttggagtatctcaatctatcttttaacaatcttgagggaaaggtgccagtgaaaggaatatttgagaatgctactacagtttccatagttgggaacaatgatttatgtggaggtattatggggtttcaactaaagccatgcctttcgcaagcaccatctgtggtgaagaagcattcatctcgtttaaagaaagttgtgattggagttagcgtaggcataactttgcttttgttgttgttcatggcttcagttactttgatttggttgagaaagagaaagaagaacaaagaaaccaataatccaactccttctactttggaagtcttgcatgagaagataagttatggagatcttcgtaatgcgacgaatggcttctcttcgagcaatatggtcgggtctggcagttttggtaccgtatataaggcattgctcctgacggagaaaaaggttgttgcagtgaaagttttaaacatgcagagacgtggag

SEQ ID NO: 27425 - DNA, 442 bp, Arabidopsis thaliana columbia
  unsure (1)..(442): unsure at all n locations
nnnnnnnnnnnntaaaggatgaagatatgcaaatagaacggcaatttatttacgacaatccgatctgttttggcgaagagtcgctattttcacgcgttgatgaaattcgagtcctggagaaaaccgccgattccgcccgcattcatgttcgttttacgctgaccaatggcaacaacgaagagcaagaactggttttacagcggcgcgaaggcaagtgggaaatcgctgattttatccgcccgaacagcggcacgctacttaagcagattgaggcaaaaactgccgccagattaaagcaatgagctgaattaaataacaattagccggaacaataaataaaagggaacactatatgaaaacgattttcaccgtgggagctgttgttctggcaacctgcttgctcagtggctgcgtcaatgagcaaaaggtcaatcagctggcg

SEQ ID NO: 27426 - DNA, 482 bp, Arabidopsis thaliana columbia
  unsure (1)..(482): unsure at all n locations
tgtacatggcggacaaacttcagataaaaagtttcatatgatcagatgcaggtgcacaccaagagaaatccaggagcactggcttctgcaatactaatcgctagtccttcagcaatggcagtcttcccaacaccagcttcaccaagaagaattgggttgtatttagttctgcggcaaagtatctggataactctttgaacctctttatcccgaccaataacaggatcaataagaccctcactagcacgtgctgtcagatccacacagaactgttccagtacatttatcgctgataaacacaaatttggttaaagttttatcagtatctctcttctcaaactcaacagtacgaataagagaacatagtatctatcnccagcattacctttatatccaccaggtccagaaccagcaattcgaccactaggaggagactcgaagctccctttagatgaagaagatggctctcttccatctttagc

SEQ ID NO: 27427 - DNA, 905 bp, Arabidopsis thaliana columbia
tagaggatacctcttctcttaattgaaaacaaaagtgcaggtcctactagtggccacgtcgtgactatagcaatgtatgccaatagccaaatcgatttcaggctgtatcttgaaagctgatacactctattcttcaaaggaccgagtatattgttataaacttgaggattaatgtccttgtgtagatgattacttgtctttacataaatttgagcattatccactggttctgcatcagctcttgttgtgtccacttcacttgcagcagcaaccatcccgtgttctccagcatccacggatggtccctgatcaatcgaagatcccaatggttcggggatgatctgcatatgaaatatatgatgaatgtcttagaagagactaagagtggataatgtcatggaaatgagctaaaactcattttcatcataccttgtgtcttctgtctgcaaaggggctcggagagtagcacttcaaaatattcgttacaacccttgtccacctatacattacagtttcacattatacaattccactcctaagaaagtccttgtgaatagaaatgtgagatgagtttctaagactgcggatttacgcagattgattaccacatgcttgacgctgtcaacccttcatagtaagctagatgaccaccatgtgttgtggtagccagaactatgtttttgtttgccctgcaaaagttgagacattggtacatcagtttcataatacagggagacccatcactatgcaatgcagaaagatacaaccaagaatcgcatcaaatttttcgccaacgatgcctaaagccgttcacttcttaatttagccatgcatggaaactcaatatgacagtgaaactaccaagtctagtttaacagaagaattaccaactcaatttagcaacc

SEQ ID NO: 27428 - DNA, 454 bp, Arabidopsis thaliana columbia
  unsure (1)..(454): unsure at all n locations
nnnnnnnnnnnnnnnnnnnnnnctaaagtaatactcagccagctttgtcatggtttgcactaaaatcagcactcagcaataaccaaattgctgactggttacagattgccttatgggccgggcaagataaacaggttattaccgtttacaaccgctaccgtcatcagcaattaccagcgcgtggttatgcagctgtcgccgtcgcttatcgtaacctgcaacaatggcaaaactcgcttacactgtggcaaaaggcgctctctctggagccgcaaaataaggattatcaacggggacaaattttaaccctggcagatgctggtcactatgatactgcgctggttaaacttaagcagcttaactctggagcaccggacaaagccaatttactcgcagaagcctatatctataaactggcggggcgtcatcaggatgaattacgggcgatgacaga

SEQ ID NO: 27429 - DNA, 1726 bp, Arabidopsis thaliana
gtatatcaattaggttaaaagcttcaaagaataaaatattagggtcagaatcagaacagttttgtgttgttgttattgttatgacttatgagcaaaaagaagtaaactttgttgtgtatgtaaccaaagttttgagcttgactcattgatgtgtttgtgtatgtgttgatgcattgtggttatgtaggaaggaaggttggatgagaatggacacttgcaatgttcgtatcatggatggtcatttggtgggtgtggatcttgcactaggattcctcaggctgctacttcaggtcctgaagctcgtgctgttaaatccccgagagcttgtgctattaagttcccgacaatggtgtctcaaggtcttctctttgtgtggcctgatgaaaatggttgggatagagccaattcaattgaaccccctaggtaacgaaaatgattatcttctcaggcttccatgaacatagcatactcgttttattactcgttttattaaatgcgttgatctttaacataaaaggttgccggatgatttcgataaaccggaattttcgacggtgacaattcaaagggatcttttctatggatatgatactctcatggaaaatgtatctgatccttcccatatagattttgctcatcacaaggtgttgttttctttctcaaagctcccaatgtgtttgcatttccactaagggatattatcctcaggcgatgattacgtgttgtaaacaggttacaggaagaagagacagagccaaaccattgccgttcaaggtggagtcaagtgggccttggggtttccaaggtgcgaatgatgacagtccaaggataaccgcaaaatttgttgctccgtgctattctatgaacaagtgagtgttgagtttgctcactatacataataaatggttagcatacagttgcatagaatgaaattgtgtatccttgtctacagaattgagttagatgcgaaactaccaatcgtcggtaatcaaaaatgggtcatttggatttgctcattcaatataccaatggctccaggaaagacccgttccatcgtttgcagcgcccgtaacttctttcagttctctgtaccaggaccagcttggtggcaggtaaaacaaactttgattccatctctaatccgattttactacgtaaattcttctgaagctgttccttgttaggttgtaccaagatggtatgaacactggacttcgaacttagtctatgacggagacatgatcgtacttcaaggacaagagaaagtattcctcgctaaatcaatggagtcaccagactacgacgtgaacaaacagtacacaaagctcacattcactccaacccaggcagaccgttttgttctagcattcagaaactggctcagacggcatggtaagagtcagcctgaatggttcggctccaccccgtctaaccaacctctcccttccactgtcttaaccaagcgtcaggtgagccatcaatcatgcatcctaacatcatttgattgatctctatatatatacaaacacatgtctgaaaacgtgacaaatttgaacaaacagatgctagatagatttgatcagcatacacaagtatgctcttcctgcaaaggagcttacaacagtttccaaatcctcaagaagtttctcgttggcgcgacggttttctgggccgccacgcgtggtgttccttctgatgttcagattcgactggttcttgctggttt

SEQ ID NO: 27430 - DNA, 572 bp, Arabidopsis thaliana columbia
  unsure (1)..(572): unsure at all n locations
agtcaccaaaggagcaacaatggaacctgacctgcctcctccattggcggcggcacagattaggcgcctagggatagagaactgtcgaggaggcgaacaagaagaaaccaagtcaagaagaagaataggtctaaagctcgagctcaatcgcgtcgtcacgatatgaatcgctcgcatctctctttctgcttcagctgagtgagatagagaattagcaaaagaaagagagaacacaatttctttttggtttgattcaaaattagattgggcatgtccggttaaagtccaaccggtttggttttcctcttattccacactgaaactctaatgggctgggctttataatgatcgttataggccctgtaactttttttttccatgcaatttaaacagaagaaatttcatcagaactatataattataaaaatcgacggtgatcagaatcaataatggtacaaaaatgtaaaatgtttgatacatgcatgcaagtgataagaaaaaaaacgttttaatcaatcttgaccggtcatcgtctntcaagaggccacataaatcgttagtgaccaaagaga

SEQ ID NO: 27431 - DNA, 401 bp, Arabidopsis thaliana columbia
cgtgctgatgcagcaatcaaagagctaatcgtccatacaacacgcaatttcaaacctccgtttgtgtaaaacgattccggtatactcccattatcatcggagccagaagcgggagcttcaacgactgtagtagtatcacaagcttgagaaactctcattggagttgatgggatcactgaagaagcaccgagaatcacacaattatcaagagtagaaccaaattcagctctccatttcaacaaaactccatcatcaatccctaattcaccactaggaagctcaattctgaagtaacgaatctcatcggagtttttcaagacctgagttaggtgaatgatgcgtaacaccgccttgttcgatctctccaccatcatcatctccactaatagacaacgaagaag

SEQ ID NO: 27432 - DNA, 602 bp, Arabidopsis thaliana columbia
ttcactaaggtcacaagcccttcttctcatctctttcccttcttcactctctctatccataaacctcttcactacttccttgatctcctctctccctatcaacaactcattctttttcgtcctctcgatcctcattccgactctccagtcctcaacaatcatcttagcgttcagaatctgatcccaaaacaacggaaacgctagcattggtactcctgaatatatcccttccaatgtcgagttaaacccgcaatgagtccaaaacccgcctacagctttgtgacacagcacccgaagctgatcacaccagctcaccactacacctaagctaccttcaagagcctccttaagctttaactcgcccccacgagccacccaaagaaaccggactccactttctctcagtcctttcactatttcctccatctgagcttccgagaccgaaagaaaacttccctgagatatgtaaagaacagagccttccggttgttcctcaagccactggatgtaattaggttccttgttatcattttgaacagaaagttcttcaaaaggtattaaaggcccaatagcgtagaccgggatatcgagcttggaggtga

SEQ ID NO: 27433 - DNA, 539 bp, Arabidopsis thaliana columbia
gaggcaaacgccacattttgtagctcagagatgcgaagtgtccctcggagatgagaaagttctttgagctcatgcagcccggcaccactcagccttcctataacaaaatttgataacttctgcaagcttcgcagcttttttattccgggtggcatctctactaaaggagtgccaacgaggtcaaggaggcgcaaattgataagttcggcaatgctttttggcaggcttgtgaggtcacgacaatttgacaacaatagtgtctgcagattacagagagtacacacaaactctgggagctcttttattttggtgcttgacagatctagataccgtaaaagcttcaaaccttttaacgatttaggcaagttggttatctgataatgagacaagctaagaattcgtaggccactcaatgcattgagcaaaggattcaaaactttttctgttagttggagagattcaagagttgttggcgagttgaaaggaagaatggttctcagaaactcagctccacagatggacctaaaagccacagaagc

SEQ ID NO: 27434 - DNA, 495 bp, Arabidopsis thaliana columbia
aggtcgactctcaccgcttaaggaaatcgttcagacatagggagataacttaaaaggataggccaatgagagtcggagacagaggcaaagaagccacataccacaaacgacttcaaagtgtgtcaatgacacttccactagcatgtcgaggaaatacaaagtagtcactatcaaacaatgataatgacgttgagaagaagtcctttgcctcatggttcgtcgatgcgaaacgcaaagagggcgttgggacaacaaggtgaatatcctgaaagatacagataaattcgggtttgatcttgggttccaattacagtgggttcggagaaaagagtttggagaaacttgggtaatcaccgctcgttaataacgggatcataatgcccatcttctttactcttgtaaaaacaatagggagatctctggcgatgctaagaagcaatagtgactgaatggattcaataaatagatgcagcatagatgacaacttgaagaaat

SEQ ID NO: 27435 - DNA, 494 bp, Arabidopsis thaliana columbia
tcccaattgcaagatcatttacacataaaccaggcggaatcacaatgcttcagagaatcggcacaggcatattcctctctttccttgctatggttgtagccgctctagtggagatgaaaaggcttaaaactgctgcggattacgggctcgtagattcacctgacgctacggttccaatgagtgtgtggtggttagttcctcagtatgttctctttggtatcacggatgttttcgcaatggtgggtcttcaagagttcttctatgaccaagtcccgaatgagctgaggagtgtggggttggctctgtacttgagcatattcggtattggtaactttctcagcagtttcatgatatcaatcattgagaaagcgacaagccaatctggtcaagcgagttggttcgcaaacaacctgaaccaagctcatctcgattacttttactggttactcgcttgtctcagcttcattggcttacctcctacttgtatgttcaaa

SEQ ID NO: 27436 - DNA, 511 bp, Arabidopsis thaliana columbia
ctccgacgcattactcggcgatgtttaaaagcgcttgccctggtgcttacagttacgcctacgacgacgccacgagcaccttcacttgtaccggctctaactacttgatctctttctgccccacccggaactaaaaaacaggagctccggttcaaatttcacgtttctattgcttaatagcactttggttcatatttatccattttaaagatttttctagtactcagttgttacattcatttcattggcattgttgtattgatttgtatcttgttttatatttaacaaagtattgattttgcattacctatttaaattgagatctggaaaaacaaagatggaggcttcattagagattttatttgtttcatatcattttgttcttgatggacctaattacatgagagagcaataacaactactagtgtttaccaaaagagagagagctaaactatttacccaaactttttaagccgcggaatgattacacatgtgcccgcgcagatatttg

SEQ ID NO: 27437 - DNA, 1888 bp, Arabidopsis thaliana
gatctcaacctcagaccggttccaaaacggtggagaaacatttgtgaatccggagctagattcggtcctcgtaactgtaaccaaaaaatcctcggagttagattcgctctgatatggtttaatataatatatcccataaattataaatttatcacgatataatatgatttaacacagtatatttataaatttatcgcgatacaatataatttaacataatatatttataaacttattatgatacaatttagtttaacacaatatatttttaaacttattgatatatattttgttattttgttaatatagtagttatcaggtaattcataatatattcttacttatatatttaataaacaatatcatttaaatcagataaatgacgtcggtaataattttcttgtgttgttaaataatttattatgagcgggagggtatttttgtccgacttatagaagttgaggaaagagaactaattatacaatttcagaaaacctcgtccacggtaaaagctctatggcccgataatcaagaacactatctcgaccaccatctccgacgccggtaaaggccatgcttgccggcgtcgggacttttccttctttgcttctctctgcttcacaatgatatatgtttcctcctttgcgcggccactttctcaatcatctacggttcccatgcgtcttcaagtgaagaacgacgtttcttcctccctcttgcccagatctatcgattctaattttccctcgctttccctgaaacctttctccaccgtgtctcgtcgcctttagttacctcttcacctccccctgcatttcaaccaaatccctcatgtctcgtctttgagctttcgggattcttactgttggggagcctccggccaacgctctctccggtgaaggtagctagggtgagcggcggcgatgacctaattactttggttgcctcacgttctgacctaattttctcccaggtggcttaggcccattctccttacctttgaggcccatttgcagaataggtgttccaaaacgtcttcttcagaagcccaggtctgacccaaactttctcttgctctcctttaatataattttgagtagattcatgtcatctattgattgtggacgtcaattagagcatactctctcattattgctatgttggttcaagatttacttgagaaccctgccactagaaacacctatatccttcttccatggttgtaagagtttggaaaagagcggcattatgatctcgcctccaaagagcggtgattaccgcattcttttcaaattgtcatctctgctgcacctatccattgaatttattcagtcgcttttgcttcttagcatcatcagagatctacctaaggattctacaagagtaatgaagatgggcattatgatcccgttaatatcgagcggtgattacccattcttctccaaactcttttctcccagcccactgtgtttggaactcaagatcatacccgattttatctgtatctctcaggatattaaccctcttgtctcaacgccctctatgcgtttcgcgtcgccgaaccatgaggcaaaggacttcttctcaacgtcactttatcttggtttgatagtgaatatttcatatttccccgaagtgttcgtggaagtgtctttgacacactttgaagtcgtgtgtggtatgtggcttgtttgcctctgctccgactctcattggtctatcttctcaagttatctctctttgttgctagcttatgtttttttaagatctttgtaacctgtttcatctttgagaactttgtaaacttgcccttatgggatttgatggaatgaatacaaatcttgtttgataaaaaaaaaaaaaagaactaattatacaaaaattatag

SEQ ID NO: 27438 - DNA, 510 bp, Arabidopsis thaliana columbia
gtagcttaggtgttctccttatgatgatcatcaagtatatgaaatgtttgtacctatatgcatgtctatcgataaatcggatgaattatgtttgcttctgtttctcgccggttttgtaaactatttggatggttgttctgtttgtgtatcagatgggaagcagtggatggatacaggaaaggtgtgactgaggccaagcttaaggtggccattaatggattcggtaggatcgggaggaacttcctgagatgttggcatggtcgcaaggactctcctcttgatatcattgccattaatgacactggtggcgtcaagcaggcttcgcatttacttaaatacgactctactctcggaatctttgatgctgatgtcaaaccttctggagagactgcaatctctgttgatggaaagatcatccaagttgtctctaaccgaaacccgtctcttctcccttggaagtaagtcgaaaaaccactttatgtgatcagtcttttaactcaagtctagaat

SEQ ID NO: 27439 - DNA, 212 bp, Arabidopsis thaliana columbia
cgtacagatgctctgcttctccttgtcttgatacatacccgtccattccacactacagacattcctcatgcgttgcttggatcacatctgccgtcaatgctaataccggatgatgccagcttgtttagttaccgctctctactatcaaaccctcacaattcttcattctcctgttaatatcctcttcaatatctcgtattctccatgtagct

SEQ ID NO: 27440 - DNA, 562 bp, Arabidopsis thaliana
ctagcctgatctcgaataaactgcaaaccttttcttttcgctgattcctaaattgacttgaattgaaggtacattatcatgagttcaacaaagaggagcaaatggctgcgttggaagacgagaagaagatcatggaagaaaggaagagactgaaggaagcaggagtgataggtagcacaatggatgcagtcgggatggtgggaagtgggccccgtgctggtgtaggaatggttgggaccggtattggcacaggagtcggattggttggaagcggtgtgagctcgggtgttgggatggttggtagcggttttggagcggtcggtagtggattgagcaaagcagggagatttatgggaagaacaatcacaggtcagtctagcaaacgtagtggctcctcaacacctgtgaataccgttccagaaaacgatggtgcaaaacagcagtgagtaaactttgggtttaagcaagatttgtgatcatgacttcgtttttactctttattgttctgttttttcccctttaacctctcgaacttgatttctggatcactgcagtaatttgt

SEQ ID NO: 27441 - DNA, 380 bp, Arabidopsis thaliana columbia
atccacctcttaaggtaaatgattttttttttttccatgtgtcgtttgtagtcgtagattcgcaacacctaaatttgggaaacttgtcttactccttatctcgtctcctccagcggattccaaatggtaagtggatctgcccaaaatgttccccaaacagtgaagcactcaagcctgtcaatcgtttagatgccattgctaagcgagcaagaacaaaaaccaagaaaagaaattcaaaagccggaccaaagtgccaaaaacctgtctcagatttattgcagttctataatttctggagaacaatcttcagagaaagggaaatctatatcggccgaagagagcaaatccactaggaaaggaagtttattcttcccgatgga

SEQ ID NO: 27442 - DNA, 604 bp, Arabidopsis thaliana
gtctccatcccattttacccatgcttttaccttgtctagttagtttgtatccctttttatttggaaagaagagtcagtcatataaaactcagaggtatagttaggtgtaggcattagagaatgtctgttgaaagctgcgacgagacttaccttgtggttagcaatatcagtcggcaaatcgatattcagaaagcattgcatagggtgagttttgttcttgattgcaccgagtatgccgttgataatgggcaagcaggcttgggcagaaagggcaaaatcattagcattcatctctccacgtttcctatagcattaagggtgaataaaatagaagacatttagtggcaaaaagagaagatggtatcaataaaaccgtatggaggcttaaaaaaaattaggagtgtaacacaaacatagaagaaataacaaacatgttatgaaactttttaaaagtaagacgcaaaatctctgcaagtaagacattaagctcttaccaatcaaaatcatatgatatggaggcagaaggcacatcataaaggaaggcttcacgagcgccacgaacagttccagaatagacgctgggatggaattacagccaggtaag

SEQ ID NO: 27443 - DNA, 540 bp, Arabidopsis thaliana columbia
tgaggcattacacaccagtgagagagagaatagtgacggatgactcgaaagagtcagacaaattgggtcaagtcgcgacttcaaatgcatcaagaagacgtttggctggatcttcagtttagacgtaggcccttttagggtccatactatacatcaaaccacaccgcaaagaataaaagagattggtttctctagcctaaagctaagatacttgatcatactcgaaacttagatttctcattttgtaggcacaatatagacttgatctatatttgcttcaatccatcttctaagggtgtttgtccgccttgtttgtcttcttatcagaacgtgtttattgtataaaatgatttatggttatggattattactctaatttctatatcgaatgcttctgcagagacgtttgttgtgaaatatctcggccaaagcaacaagtagaaaacaaagcactttattaaatcattgtaaaaacttttgaagatctattgttacaaactaggatatcatcaagccagagtttcaaaactcggagttctt

SEQ ID NO: 27444 - DNA, 615 bp, Arabidopsis thaliana columbia
ggccaagtttattttgattccccgtatcataatcatagtgtgattgattcaaaagcacaagagagatatatagtatattataggtagaatcttttattttggttccacaaaatttcggtatatctagccagaactggattgaagcataaggtattaactaaggttggtgagtttgatgatgatgtgagtttaatagtgcaaactgataaattgattgtttagtagctttaaaaataaaattaagagaagaaagaaatgatgaaaagggaattgcaggttagggttcatagtggactttctatcgcatgcaacgatagtaggattcatgggaggagcagcgacggtggtgagtctgcaacagcttaagggtattttcggacttaaacatttcacagactctaccgatgttatctctgtcatgcgttccgttttctcccaaactcacgaggtgtctctcatttccgttatgttgctaatacatccaagatatcattttcaatgtcgatgattgtctcctaattaatactatgaatattcatagctatattaaacagtaaacgtctaaacatgtgtttgtgtatgtttgttttggttgtgtagtggagatgggaaagt

SEQ ID NO: 27445 - DNA, 532 bp, Arabidopsis thaliana
gattcctgttatagaagagctattggatgaactgaaaggagccacagtgttttcaaagttggatcttaaatcaggctatttccagataaggatgaaactgagtgatgtggagaagactgccttcaagacacatgagggccattatgaatttctggtaatgccatttggcttgaccaacgccccctccacctttcaaagcgtcatgaatgacctattcaggccatacttgcgaaagttcgtcttggttttcttcgatgatatactagtttatagtcctgatatgaagacacatttgaagcatttggaaaccgtcttacagctactgcatcttcatcagttctatgccaattttaaaaagtgcacatttggaagcactaggatctcatatttgggacacattatctctgagcaaggagtcgcaacagatccagaaaaggtggaagcaatgctccagtggcctttacctaaatatgtgactgagttaagaggcttcataggattcactggctactatcgccgatttgtcaagaat

SEQ ID NO: 27446 - DNA, 748 bp, Arabidopsis thaliana
ccactatcattacaactgaaaaatatatatttgacacacaccttgccaccaggaaggacctgcgaaaatgcctgccagtcccctcgaggaaacaaatgagccaacactatatgaccagcctcatgaacagccagaagtctcttcttttcgtaagatacctaatattacatacgctttaacggttagggcttttttagctgtggagcatagtatgtattgagatcaatagtacaaaggatgtcagtacgaacactttgtccacatttctgttgctcttcctctgtaagaagtacacccataccctcgagcaattgtttatctaacacatcaacaatgtcttgttgatatatgtaagaacgtcccttccttacctgtaaaattggattacgatcaacaacgctcctctagaaatggtataactaaattgggaaattgagatccacataagaatatgacataccgacattatagccgcttcgttaacaagattccggatatctgccccggaaaagccaaccgttcgaaaaacaagctggatgtgaaaaaggatatagttgttatgaatgagcaaacacctatatcaaacatgttattgggattgaaaaatagcaggaaaacaacttgccttcccaaagtctatatcttctgcaaggttcttcccagcactgtgaactcaaatatttgcacctttgctttgcatcaggcaacccaatataccagccgacggtcaatacggccagaacggaca

SEQ ID NO: 27447 - DNA, 1454 bp, Arabidopsis thaliana
cagttttagaacttgttgctagttcttgagctgaggtgtttgttggtgtatttacttttgcaatttaggtttctgagcttgctaagatctaatgttgtagtaaatgtataatgaatagttttgctaacatgatttgtaaaatgaattttggctgagtatcaacatcaatgtagttggtatagtagatctatgaatttttttagtgaactaatactatttctgagtggtaacaacatgaataccgacactgtgttttatgcattttgtattctaagacttgctaaatttactttgatagtgctgtagcataatcattttttccatttgagttagaaacatgtttctatttcctctcccttttgtactcaaattcattatacctcgtgtcttttttgcaggagagcagttggttttcacaggaaattacttggccgttttcgtaacccgtacacccatttgaatgcgttcagggaccgccctgtggcaagagctacacctccgtcatcttcggtttctacgagacctgatgccaaaagatcctctacattgcctccgccacaaaaaagtcctcctgcgcaacatgtttctgctccacctccttttgtgcaccatgtgactttacctagtctaacaagcagctccaaaacttcttcaaacagcacaattcctatagtggctggctgcatagcgggtgctgtgtttatcctccttttagctactggtgttttcttttttaaaagtaaggctgggaaatctgtgaatccctggcgtacaggtcttagtggacaacttcagaaagtgttcataactggtaattgcctttctactccctgatacaaaaatgtgaagtggcattgttggttctagaagatgagatttaatagtcgctccactttttttcttttcgatattaatgatgtatgatttgttactcaggtgtccccaaactcaaaagatctgagattgaagctgcctgtgaagattttagtaatgtcattgggtcttgccccattggtacattgttcaaagggacgctatcaagtggggtggagatagctgtggcttctgttgctactgcgtctgccaaagaatggacaaataatatagaaatgcagttcagaaagaaggtatttccggtcaaccagttttcttatattttaaggattttgatttctatcaccttatcgattatggtttcgatgatttcagatcgaaatgttatccaagataaaccacaagaattttgtcaaccttcttggttactgtgaagaagaagaacctttcactaggatcttggtctttgaatatgcatcaaacggaacagtctttgaacatttacactgtaagtaacaaagctctttagtcatatgagtcattattacactgtaagttgtcagattaaaagtgggaaaacaatatttacttttgctgcagataaagaatcagaacacttg

SEQ ID NO: 27448 - DNA, 431 bp, Arabidopsis thaliana
caggtaaatctaaaacgagttagtgtcaaatctctagtggctttgttatcaagaatcgaaaaaacgtttagttaccaaacctagaagactatctgtaatgcaacacaatctaaaccaataatcaatgcttcctcattagaatctaggcctagcaaatgagaattatgtagcgaaacaggaactctcaactcaaactctaaggagctgcattttgttagcaaaagcaataccaatccaatcaggctgcgaagaagaccactgcaactgattaatctccgaaccagccgaataaaccgacatcggatcaatcccattgggtccagcaacagtaggaagctcccaaataagagcctgtgtatcatcaccaccagaacaaatatgtttacagctctgaggcgcccaagctatagcattcacactagcctgatgtc

SEQ ID NO: 27449 - DNA, 443 bp, Arabidopsis thaliana columbia
agtttccacattatctaagtctgctttctcaccacgaaaacctcacttacaagctgcttaagattctctgactacactagaataactataaatccgattctaagtaaaaacattaaaatcaaaatcgaatttcttaaaatcgaagtaagaaaaattgaattacttgtaagaacaggagacgcggaagttgatctctactggatttccatatccaattgctcctcctaagccacttgtcttctgcaaaagaatgggagcttagagatcaaaaccgtaaccaatagaagtgaaatacacgaaagtataaaagacatttaacctgtgaaggaaagtctagggtttcggggatgatcgcattaggacgatgctggtgaggaatatgcggtggctgatgaggacggtgaggctgaggtttaggaggcggaggagtgaagaggttgacg

SEQ ID NO: 27450 - DNA, 785 bp, Arabidopsis thaliana columbia
gagcaagccttgtccttagtctcaccatctgtgaacaaacaggtattctcttctctctgtttgcatcactgagagaaattgaaatttctatcgcctctcgtttagttggaaattaaacctcattttgatgggtttgcagcaaagaagacactatgacgcactatcgacaaagcttcaagaaagcgtcgtgaggaacactgaacaagtcaccatagggccatcttttaccctcgagtaaaaacactctttacttatagaatgtctgcaaaatctcattttccaagggtagatacggtctttagttaaatataaagactcgtctgtttttctacttcagacacgtaatagaatcaagttatgtttccaactgttcttatcggatccgtaacgctacaaaaattctgatactgtaagttgtatgtacagagatgagatagagaaagcgagaacaaaaagctaaagacaactagagggactgataagtggtaagtagaggtcctttatttatcagccagattctcgtttgcagttcccaggtaataagtacttgtagctatcagcattctgaatcaagtatccagggagatgaacagctgaataagaccgtggaatcggaccaagtttgccgataatctccctgaatgtgtgttcttcaggaagcatatcgagaagatcagtgcctttgcagataatgtcttggattcgtctcggggtcagataatgtaagaatcgtaccggtcagtatggctataagctttcatcttgaacacgaagtcagtgatgtg

SEQ ID NO: 27451 - DNA, 581 bp, Arabidopsis thaliana columbia
cgaaagagttctttgctctttttgatttggtttacaagcaacaggttatgatgcttgaggagcttcataagttaaagagaaaactcgataagaggcttaggaatatcaaaacatggagaagggtgtcgaatatggtgtttgtgactgcgtttgtctctgtgcttatcttctcggtggttgcagccgctgtggctcaccgcctgttgtggcggctatagctggtgcattggctgttcctgtaggttctgttgggaaatggtgcaacactttgtggacgaagtatgagaaagtggttagagggcagaaggagattattacatcgattagaatcgggacttatatctcggttaaggagatggataatataagtattcttgtgcgtaaagtggaagtagagattgaatctttgttgaagaaagctgagtttgctattactgaggagaaagaagtgaggcttgctatagatgagatcaagaagaagctcgatgtgtttactgaaaccattgaagaacttggggaacatgcgtgtaagtattgtagcgatgtgacaaaggcgagaaccgtgattctgcagaggataa

SEQ ID NO: 27452 - DNA, 321 bp, Arabidopsis thaliana columbia
gagacttttcttgtaaaacctgattacaagagtcaacacaatccagagccgcacgaactgctcctgactcagtaactttcctcctgattgacgagtctcgcttcgtgagtcggacgagtcgagtcaaagactcgagctttgatgcattagacgacgattgagagacgagagtggagattaaagcttgggattgagagtgagagtgttcttgttgagttcgaggacgtgatgattccttaagactcacatgggcgaagtttaaaattaagctacgaagtgcgtgattgggaatcagataaggggtttctgataagggtagct

SEQ ID NO: 27453 - DNA, 593 bp, Arabidopsis thaliana columbia
agctcttgtgctggactaatcacagcatcttcagaaggacagtagaatgtcggtatcgatatccgctccatgtcgctgttcacaaccgctctgtgaagaacactcttgtatttttcattgcttataacctatgaggagaaacaagcacataaagtaagtacaaagagagtgaacaaaacagatgatttttttttcactttgtctcctaattacctgcatttggtcaccaaggttgactatgaaagtgttgggaacaggattaacagcgatccatttaccatctttaaacacctgtaaaccagagacttcatcttgaagaagaacagtgatcaagtttgcatctttatgccccggaagtccgtaagttagctctggttgaggacactggggatagtagttaatagccatgtgttgaccatgtttgcctattgtattgcttacacggtctttcgcaagacctaagctctctgagattgcctcaagaagtgtcagaaccaaggctctaacgcttgtagcgtattcggctgtgacttctctgaaagagatcggtgttgagggcattcattgatgaaacatcgatagggtacaatgga

SEQ ID NO: 27454 - DNA, 444 bp, Arabidopsis thaliana columbia
atatctagtacagtacttcaaagaatattgatctcttcatccactgacaaagatcatttgattcttcacactcttcttcttgtatcacctcatcatcttccacctcaattcttaactctcataaattccttatctagaagtgttccaaaatcatttctagaagcttgtagtgtctcatatatttcagcagcagtttgtatcctattggcattcccttcctcaacagtgttatcaaaccaagctcttctatatctgtaacgatggccaggcggtagtctctttctatctccatatagacaaacttacggctacacttaagccatctggaaggtgtatctcgtttccacatacattgcaagcttgcgtcaccttcactttacatcgagactatgttcctagggctggatagtcactaatactccatagcagcatggctctaagtgt

SEQ ID NO: 27455 - DNA, 533 bp, Arabidopsis thaliana columbia
tctctgtttttatccttttcagattcccagtagatgaaagaaatactcagaaatctgttgtagaatacttccacgaaacatatggttttcgcattcagcacactcaactaccatgcttgcaagttgggaattctaataggcctaattacttaccaatggaggtaactttgaaatacgtcatcaggttttattagctcaccagtacttccgattctaatgtgttgctgcacaggtatgcaagattgttgaaggccagcggtattccaaaagattgaatgagagacagatcactgctttgctgaaggttacctgtcagcgcccgatagatcgagaaaaagatatcttacaggtatgtttctttattttcgataactttgttttccttcacttgaatcaagagtatctttttgtccgcctatcttgatagtcgttttaaataatgtatgctggtgataaagcctcattgtggaatagatcattgtaaaatctgtttattcttacttggttgcatgtgtttacttgaagtaagtgat

SEQ ID NO: 27456 - DNA, 496 bp, Arabidopsis thaliana columbia
tgtttttcaacaaagaaatttatttattaccaaagtgattataatagtgttgatgtaacaaaataggtacagtacaagaatcagaatacacaaatgttgaattgcaaccaagctttgccaactcatgtgctactttgtttcctccccgacgaacaaagctaaactggacatttgaaaacttcttcgcccagatccgaatgtcatcaagaagatttgccagatggttgtgggaagaagatcctgagactaaattggttagagtttcacagtcaccctccataatcactcgtagatagcctctaatccctgtgtgttgtaaggcagccagaagcgcctttgtttctgcctctaacggagtacttgtgttgtcgagttgcagtgatccccaatgctgtgcaataccatcatggtttcggataagccatctagcagtggagtctaaattttggacattgaaaccggcgtcataagtacatttgatgtgtgtatcaggcgg

SEQ ID NO: 27457 - DNA, 538 bp, Arabidopsis thaliana columbia
tgtgagaacgtacctcagaatcaagacgacatttctcaacgacggtggtttcgtatgcattcttgagtttagtgtattcatcctcgactcgtttgttcttccaccgtgcacggcggttttggaaccagacggcgacttgacgaggatcaagccctaactcagaagcaagccgatctttcctctcggattcaagcttatgatcgtcttcaaagctaatctccaacattcttacttgctcatcactcaattttctctttctaaaccacccattgccttcgttttcaccctcctctgccaccacaacactcttgctcttccttttcctccgccgtgttggttttgcttctcctcctggtcaaagaaacccatcaaaaccaatggtacaacaaaacataaattctttaaatgcttagctcttttaagtcttctctagtatcatgtacgtatatgaaaatgaaaagactacagaagacaaacatattatccagaacaaaaatacagaagacccacttgaagatatttctataaccaattttgg

SEQ ID NO: 27458 - DNA, 488 bp, Arabidopsis thaliana columbia
tgttaactttctctctctttccttccttttatgcaggaggacttatcaaatctttgatatggcacttagggtccacaagaacatacaacagagagacatggttattggtcggaatcttggaaactggattctccgggggcttgaccggatgaagccatcggtcaggttctactaccaaagaatacagagccaagcatagacaaggcgaaaagagtattacaatcaacccgtcttaaaccacatgttaacacgcagactcctcagaaccgtgagttgataggaacttgttcatgtccttgaggaactttcggtccaaataccccattgcttcgatgatgatgatcaaacctccaagatccacgggaactactactcagtacaggccttacagtgttggtgaatccagtctgattaaaccaatttatgctagaggcgggttcaacagcgtcatcaggaaggacattttgcagtggatggtgcagaagaga

SEQ ID NO: 27459 - DNA, 195 bp, Arabidopsis thaliana columbia
cgaagttgtcatgaacaaatgcagtgtaatttaagcaaacaagattcggtgtatcaaataaataaacccgtgaacacttcatcgttacattcttgaggcttgcacttgatacagtctcaatctcatgattccgatataaacaacgtacattagccaaatctaatgcctcaagcacagggcaagcagaaagtagac

SEQ ID NO: 27460 - DNA, 494 bp, Arabidopsis thaliana columbia
tgatatgagcccagcttaagcccaaagctaatccaccgcagctaaaccgggtcatctacgcaacaaaatcgaattaaactgattttctatgtgtggacttcttaatttgttcttttttagtttttttggaacgtgcttaacgtagattagtagagaactagagatatatatgtacctgaatatagagcaaaggagagaatgccaaatctggtccaactggttgatggtaaaccaaagactcatcaacggaccggtccggtacacggagccactcctccacagtgagatcacaatgactctccacgaaacgtgtgccacagtcgttgcactttaggtacggacgtcccgattcatgtcgcctgaacctgccaatgatgcaagggatctggtagaacactgaaaacaaaggcgccttcacgtccatcacagtcaagtcacgtgctgtcccggccgagtaaatgtaaacgcctttaggtagtggagcttcatggcga

SEQ ID NO: 27461 - DNA, 394 bp, Arabidopsis thaliana columbia
gcttttggtgcttttcttcttgaagtaatttgtggcaggcgaccagtggaacctgagctaccagtcggaaagcaatatttggtcaagtgggtctatgaatgctggaaagaggcttgcttattcaagaccagagatccaagattgggagtagaattcttacccgaggaagtcgagatggttctgaaacttgggttactctgcacaaatgctatgccagaatcaaggcctgcgatggaacaagtggtgcaataccttaaccaagacttacccttaccgattttctcgccgtctactccaggtatcggggcttttatgccagtttctatggaagcattatctgccattggggtctccagtgtaaggaactcatcagtttctatgtttgtactcacac

SEQ ID NO: 27462 - DNA, 439 bp, Arabidopsis thaliana columbia
gtaaacataacgagcgtttagaatttttaggcgactctattctgagctacgttatcgccaatgcgctttatcaccgtttccctcgtgtggatgaaggcgatatgagccggatgcgcgccacgctggtccgtggcaatacgctggcggaactggcgcgcgaatttgagttaggcgagtgcttacgtttagggccaggtgaacttaaaagcggtggatttcgtcgtgagtcaattctcgccgacaccgtcgaagcattaattggtggcgtattcctcgacagtgatattcaaaccgtcgagaaattaatcctcaactggtatcaaactcgtttggacgaaattagcccaggcgataaacaaaaagatccgaaaacgcgcttgcaagaatatttgcagggtcgccatctgccgctgccgacttatctggtagccaggtacgt

SEQ ID NO: 27463 - DNA, 443 bp, Arabidopsis thaliana columbia
gcatttatgtagattctaaaaccctaagcgagaatccaaaaatgagtgaagaagatcacagtgctaaggtgaagaagtctccgaagaatctctcaaaactatcttcgtcttctcttacaattccgacgaacagagatttccattctctctccaagtccgacgagttcaagcgtccgatcgatgagttagcttggagctcgcagtctgttcttgagacgattggtggtaagaaatcgatgagatttgatgatcccatggatgagttcaagaggaatcgaaagatggaggaagattcgaagaaggtaatggatgtgaaagtggctgagagtgataagggattcgcgaaatttggcaaggcagaggttccgtttcatataccgacgttagcgaagcctcaagaggcgtataagattttggtagacaatgcttataatccttttgag

SEQ ID NO: 27464 - DNA, 458 bp, Arabidopsis thaliana columbia
tttcgattggtaacattcaggagaccaaactctcggtggtatgtgaaaaagttctcgatagatgtctggctccaaacacttcaggtggtgaaggctgtgataacatgaccatgatattggttcgattcaagaaccctactccatcagagaccgaactaaaaccagaagcaagccaggcagaaggaaaccacgatgagccgagctcatcaaactaggcccatcctcagagtcacggaagatccctctagatctagtattttggttcagattgtaaatcattttgaaagacagttatatatctcaacctgacgttgatttcagtatatcaccatttcctccgtgtgcagacttttgtctcatgagctcccataatgtagaaaggaataattggtgtaaaaatgttgttggccttaaaagaacatatcatcatgtaaataaacaaaacaataagacattta

SEQ ID NO: 27465 - DNA, 332 bp, Arabidopsis thaliana columbia
  unsure (1)..(332): unsure at all n locations
nnnnnnnnnnnnnnnnnnnnnnttaaagaagaactcgaggataaattttctggcaaggagctggcgacgctctattaaaaagcttctcagagaactgtagacaaaatggtcgtcatatctttagcaacaaggattttgtcattaaattttccacgtccgtcttacaagctgataagaaagaaattacgataattaataaaaacgaaaacacgacacttactcaaaccattgccccaatatttgaaaaatacctaatggaaattttacctcaacgctcagacactcttgataaacaagaattaaacctaaaatcagatagaaaagaaaaagaa

SEQ ID NO: 27466 - DNA, 608 bp, Arabidopsis thaliana columbia
cgttcttgttcatggatttggtagctccaaggatatgaacttcaatgtctcacaagtatacactgatcctttatttccttgatcctctcgattcctatattatatatttttctgagtccttgatccaaaatttgtagttttaatcacatatatccaaaagtatgtgcttcaaattctgctttcttttttgtgttcagcatcgttagtttccattccattacaagattcaagaaactgacttctggagatcacatatgattttgtaattgtaatctttaatgtggaatgtttgaaaaattagatgtctgaaaagctaaattatttttcaagtttctaaagattaaacaagcaaaaaaagttagaaaaagagatgttgttagagatatggttgaagactaatgaggcttgttttagttataatctcaggagcttgtgaatgaaattggtatatactttgtgctatatgatcgagctggttacggagagagcgacccgaatcctaaacgttcgttgaagagtgaacctacgatgttcaggaactggcggatggtttagagatcggaccaggttttatttgattggaattcaatgggttcgacactgtttgg

SEQ ID NO: 27467 - DNA, 425 bp, Arabidopsis thaliana columbia
ttttttttattgccttaccattaaccatttcgtggcctcattatttctatgaatgtttattgtaatgtaataccagaggcaaatcagcagcaaattgtggaagctggtggtcttacttccttgttgatgcttctgaaaaatacagaagatgagactattcacagagttgctgctggtgcaatcgcaaatcttgcaatgaatggtacataattgtggttctcatgggctaaattctttagttgatcatttatattttggtcacgaaaccaagtcatatttacttttgtttctcagaaaccaaccaggagctgatcatggatcaaggaggcattggtttattgtcatcaacagcagccaatgctgaagatcctcagacccttaggatggttgccggagccattgcaaatctatgtggaaacggtatt

SEQ ID NO: 27468 - DNA, 762 bp, Arabidopsis thaliana
tgaaagagtttgacataaggagacgtgccttgtaagacctccgttggcatcctattgattagatacaccgcagttgcaaaagcatacgtccaaaatgtcttgggtaatgacgcatgagtgagaagcgcaagaccggtttctacgatatgacgatgttttcgttcagctaacccattatgttctggtgtatgaggcgggcttgtgagatgagaaatcccatgagcagcaagaaacgggcgaaggccaatgaactcaccgccattgtcagagtataaggttcgtattcgtgactgaaaccggttttccactaaagccttgaaagccacaaacacatctttcacttgcgatttctgcttgagaggatacatccatgtatatcttgtgaagtgatcaacaatgacaaggtaatacttgtagttatcaactgaaatgcatggagacgtccaaacgtcggtgtatagatactcaagaggttgagaagagacaatggtgtttgtgaaaaatggtaatttgtgacttttattgatagaacagtccgaacatggaagctgttttggaatagtgtttgaaagtggtaaatgaaaatgagaaacaacatcttttaaaatgggtaaagcaggatgccaagccgttgatgccaagaagagaggtcggtttttggtgatggagacgcggtaaggatagtgatggatttctggttaccggccactcatatagctcattcctagttctgccttggagtaatcgggcccccgtgttgag

SEQ ID NO: 27469 - DNA, 603 bp, Arabidopsis thaliana columbia
gggtgatgagtgatgcgagaagagtgtttgatgagattgtaaaccctagtgatgtatcttggaatgtgattgtgcggcggtatcttgagatggggtttaatgatgaggcagtggtgatgtttttcaagatgctggagttgaatgttcgacctttgaatcacacggtttctagtgtaatgttagcttgttcgagatccttggcccttgaggtgggaaaggtaatccatgccattgctgtgaaacttagtgttgtggcagatacagttgtttctacttctgtatttgatatgtatgtaaaatgtgacagattggagagtgctcgcagagtatttgaccaaactagatctaaagatttgaaatcttggacttcggcgatgtcgggatatgcaatgagtggtttaactagagaggcaagggagctctttgatttgatgcctgaacggaatatagtctcatggaacgcaatgttgggcggatatgtacatgcccatgaatgggatgaggcactggatttctcactttgatcaccaggagattgaaatattgataatgtcctcttgtgtggatctaaatgtctctctggtatacagatgtcaaatgggg

SEQ ID NO: 27470 - DNA, 412 bp, Arabidopsis thaliana
ctgcagccatttatgtagctttattgttttttgtttgtaatagacaaagaggatggtggaacatagcaagaaatcaaaatcccggcagagcacgaataatcttcctgctcttgcgattcttgcagaggatattggtcatttagcttttaatgagaaggcgatatttagtccaatcttgaagaattggcacccgcttgcagctggtgtggctgcagctacgcttcattcgtgctatggtaccgagttgaagaaattcgtctcgggtattactgagttgacgccagatgctattagagtactcactgctgcagataagcttgagaaggatctggtgcaaattgctgtacaagatgcagtagatagtgaagatggttggaaatcgggttataagagagatgcctccgtttgaagc

SEQ ID NO: 27471 - DNA, 337 bp, Arabidopsis thaliana columbia
tgcaataaattatatataacatttctaaacttctgtatgtgaacagtgtggaagtacgatgaggaaaaggactcggttttgcaagtgacgaaagatgcatacattaactgcaacaccacaaacccagcagctaactacagcaatggagatactaaagtgaagctagagagatctggtccttacttcttcatcagcggctctaaaagcaacttgcgttgaaggtgagaagcttcatattggtgtcatgtcctctcggtggtggccacaccgggtggttttttttacttggttctttctctttctcactgcaccatcgtccagcttttgttaggagctc

SEQ ID NO: 27472 - DNA, 635 bp, Arabidopsis thaliana
acgaaaaggtactgattgttgttgatagcgtaccgatgaactgatgcgtcggataaaaggccagcacgcggtgaaactgaccgcagaacaggcgcacagctgcaaccggtgttgctgaaaaatatcgacgagcgcggaaaaggcaccgtcagccgtgactgggttggtcgcgacgcaggcaaaatcgcggcggcaatcggccttaaagttccgcaagaaacgcgcctgctgtttgtggaaaccaccgcagaacatccgtttgccgtgactgaactgatgatgccggtgttgcccgtcgtgcgcgtcgccaacgtggcggatgccattgcgctacgtgtgaaactggaaggcggttgccaccacacggcggcaatgcactcgcgcaacatcgaaaacatgaaccagatggcgaatgctattgataccagcattttcgttaagaacggaccgtgcattgccgggctggggctgggcggggaaggctggaccaccatgaccatcaccacgccaaccggtgaaggggtaacagcgcgcgtacgtttgtccgtctgcgtcgctgtgtattagtcgatgcgtttccattgtttaaggagtaacagatggcgcacgacgaacaatggctcacccacgtctgc

SEQ ID NO: 27473 - DNA, 544 bp, Arabidopsis thaliana columbia
tacgtgggtgttgagcatttacctgtaagaatggaatttcttgaatctttagttgcaataactttggaatcggataattaatttttacatattaaattatattttttgtatgtattcatttagtttggttaattcttgctcgagccggatgataaaaaattatcatgtccggttccctcgggggatggatccataagaattcacctatcccaataacaaaaaaaccagatttgaatgatcctgtattacgagctaaattagctaaaggtatgggtcacaattattacggggaacccgcatggcccaacgaccttttatatattttccagtagttattcttggtaccattgcctgtaacgtaggcttagcggttttagaaccatcaatgattggtgaactgcggatccttttgcaactcctttggaaatattacctgaatggtatttctttcctgtatttcaaatacttcgtacagtgcctaacaaattattgggtgttctttaatggtttcagtacagcgggattattaccgtacctttttgga

SEQ ID NO: 27474 - DNA, 562 bp, Arabidopsis thaliana columbia
gtatgctccgaatctctcgacgaccctttggttaaaactgtctccggtgttgatctaaaccagggagatatcgctggtcatctccctgaagagcttggcctcttaaccgatattgctctgtttcacgttaactcaaaccggttctgtggtacactcccggtcgggttttcgcagttgagtctccttttcgaacttgatcttagtaataaccggttcgctggtaaattcccggaagtggtaatcggtttaccgaaattaaagtatcttgatctccggtacaacgagtttgaaggtgaattaccagaatctttgttcgataaagatcttgacgctttattcctgaatagtaactggtttagaagtaaaatcccggttaacatgggaaattcaccggtatcggttctagttctagcctcaaaccggtttgaaggatgtataccgccgagtttcggtaaaatgggtaagactctaaacgagatcattcttatggataacggtttacaatcttgtatacctaatgacatgggattacttcaaaacgttacggttttggacattagtt

SEQ ID NO: 27475 - DNA, 588 bp, Arabidopsis thaliana columbia
tgataatttgggacaatatggtaagtttttgacctctacttacatgtaagtgtggaaaatgtgaatgtgatcttggaactgtccaagaacaaaatcgtgagaaagacaaggtttattagttcttttttggacttgatgatactttgttttgaactgtgcgatctagtctcatctctcgcgtgccggtgcagccattggaaaagggtacaacatcgtaaggaaagaggatgatttgattcgcaatggtgctaacgtgggtgatgaacagcctaaagtgagtgttggtgctgttcatatgcgttcacgttagaaccagtttcaaatgcgaacgatgaaaaggagattggagtgatgtgtaagcattacaatcgatgtggacattcatccgacaattgctatggaaacccagagtggtagggcgagagatctcggagttggtatataaaaggtcgctatcgtgaagtagctagctctagtggaagaagagaacgttgaaacacgacctatgacaatcgtgttcatgtgttaaatcaggactcaatagagcaggcatttcatgtggtgatggcccagaactatgatggtgtg

SEQ ID NO: 27476 - DNA, 822 bp, Arabidopsis thaliana
ttttaaatttgagaaactcgaaaggtcaattgataatgtggcaaaacaggaggcaacacaaacgatgactcatcaggctcatctctgtggccaaataatttgaccaatataatagcccgacagctaagagagtcagatttgtcagtaataatcggaccaatcaaatttaaaaaatcaattattgttgaagttttgttggttgatacgcaaaaccctatgctatatatatacatgtgtagggcaagttgagtaaaacagatcgatcaagaaagcaaaatacaaagctcaaaacacatttctagaacaaaatcaaaacaaaagcatattatataaaaaaaaatgtcgaatatgctcgtcaagaatcaactaagatctataagcttaccttcaagctcgcatccaagcacgaccggtatcgaggaatctcttaacaaggtcaaaacgattaacaccatgacgggttcgtccgaatcagtcttgatgggcttggagggtttggaggagctctacaattgtacggaagattttctgaaaatgggctcaacgcaacgggttatgtcatcatctgatggatccgagtttatggaggagatgcttgacggttcgttgaggctaatggatatatgcagtgtctcgagggatctcatggtggagactcaagagcatgttcgtggtgttcaatcatgtgtcaggagaaagaaagtagtcggaggagaagaccaactcgatgtcgccgtcgcggggtatgtcggatttagaaagaacatgagaaaagaagctaagaggcttcttggatctttgaagacattgatggaggttaag

SEQ ID NO: 27477 - DNA, 671 bp, Arabidopsis thaliana columbia
gattcaatctactacatagactccatattacacactttaactaaattggatctccaaaagttttataaagtttgggactcaaacttaacccttcaaacacagccttggcgataaagacttgatcacttgaatactctgcttcaagaaaaaagtgaagaaaaatgcacacattcaaactcaaagtcttgctaaaatgatctataatggttcacatcatcaccgcaaacgcaagtccaaagatgattccaaccacaccatgttcttctattccgcttcttgtaccagttgaaattgatactatatcgctttcctgtgctttcgcagaagctccttggacctttgcagcaacgggaagaggtgagcagccggattccgagcaagggttgacagtgggatccgggtctctctggttgtgtgtgaaagacgtcaaatgcagaaggtgaaaatgccactggggtctcataagccaacccgtgaggagctcggtcttgcgctaaggcgaagtttgttaagattagagaagagaagaagaagacgaggcatgttttcgaagtcatttctctaactcagcttctgtttggttcttgaaagtgtagaaaggttataagttgagtagtgtagtgtatttgttgagactatgaagacagttggtatttataaggtgatgtgaa

SEQ ID NO: 27478 - DNA, 577 bp, Arabidopsis thaliana columbia
tacctgttatgatctctttgatatgattagaaaaaatttatggatggtcataaaaccttgaactcactggtcattaagaaaaccttctaattaacctaagagttttagtattttgtttacaaagtatatgtgtcaacaaggcaacgtaaattttcaaaaccttcaatggaactaaaaatgccacgcgagtttggagaagcctttttggccagaatggtttgaagttcaattgaaaacagaacattagttttcttccaaaaagtacaattgcgtattaacttcgtagaaaaacaaaatctatgaattacaatgtatgatgtagaagcaattaatagatcagaaaatgccaacaataatttaaactttttgaaattacaattttcatgaatataaacccccccaaaaaaaaactaggaaaaatatagctaaaatgatctatctatttataaaatagagactagactctcgaaataacaaacatgatttccagaattcttactcttgaaaacaaaatcataagatttggtttcgggatcatgtacaccatttgttgcttatatattagattagaagatac

SEQ ID NO: 27479 - DNA, 612 bp, Arabidopsis thaliana columbia
ttcctaccttctcactaatggaatggacaacaagctctgtgtgtgggacatgcgtccttatgctccacaaaaccgatgtgtaaagatctttgaggggcatcaacacaactttgagaagaacctgctgaaatgttcatggtcacctgatggtacaaaagttactgccggtagctcagaccgtatggttcatatctgggacacaaccagtcggcgcactatatataagctcccaggccataccggttctgtcaatgagtgtgttttccacccaaccgagcctatcattggatcttgcagtagtgataaaaatatctacttgggagagatctgaatttcaaagctgtgaaacctttgcaactctaagtggaattgaagtctttagaatcgacgatgtgctttgagacattttgtttattgaaagaaaaaacgaaacattgctctttggtacaagtaatcaagatttgttatctcctgtaatatcttcattacgctctttatcttcttctactttaacagatgaggtcacattttagttcccttaaaattgttatctttggtattcaatcttgcagtacttcgattagatcttacagatcaagcagtagaagtata

SEQ ID NO: 27480 - DNA, 551 bp, Arabidopsis thaliana columbia
tgatgtatatagatatatactctatgtgtatgtggatatttgcaaaacctgaagatgactcttaacatgggcaatacttagccccttgacgttcatcaattggagaacaagcttcggtgttgctcctgtttcaacaaaatcattgaaagagaccccaaataaatatcaacaagaaaaccctagaaatttagagatcttcacatatgcaatgatcttgatattgattcatatatataactcaaactcaactatctgggccacccaatctctccacagcttgaagaaagcaaatatggagctccggcgtccatcgcagcctcggagtctttgagcggttgtacggcctcacggatcctccattcttcttgttctgatcatggtggtgactcccactctcttcctcatagctattgctagatgggctctgatctccagatctctcttcttcatcctcttcgccttcttcatcatcctcttcatctttatcttcttcattcttggtggttgctttgatgttgttagatagacaagtcttggagttttagaatttt

SEQ ID NO: 27481 - DNA, 1402 bp, Arabidopsis thaliana
caatcaacttgaagcaactcctctgcgcactaaattctcaatggataatgagtctatagtggaacctgagaacattgtcgatacccgtgaaaacatagcgcgggttacttgtggagttgtggtcttgtggaaagaattgttagagcatcaacagacatgggtactaattcgtgatttgcacaacactttcctcattttcatcgtgtacagtttttttgtttttgacgtaaaagaaagaaaagaaaaaaaccgagattcaaatgtgtaacatcaataccaaattatacaaaaacgtgtacacgaaaaaattgttttgtttttataaaagaatacatatttttataaaatgaattaactagtgattacaaaatcttatgtttatggttgtataatatgtatccctccggcaaatcctctaaaactgaatgcccacaaagatgacaatattacataaacacctattgagagattatgttgagaagcgaggctcgtgttttaatcaaccctcgaaacaatccttcaagactcttctcgaattttccaatccatacctcaacttcctcaagcttctcatgaagatcatcatgagagatagaatctccacaaatcgcggaatctacattctccaactcgtttttgaccatcttatcgtgatcatgaaacttcttgttcatgagaactaaagccaacttgctccttacgtcgttcccgttttgtcgtccgacaagaactcaaagaaagactttaagaccgaaactgtcatataaacgacacgtctcattgcatgaatcacggccaagaaatgaatatcaccgtcttgatcataaccatgatctctcatcactaaccctacattaatgttctttaaagatccaagaagcttcttcacttctttcctcatgtttttcctaaacccgacatatcccgagacgtcgacatctttccttctcctaacacaagactgaagaccaagaacatgctcatgagtctcaaccatgagatccctcgagacgttgcatatatccattagcctcaacgaaccatcaagcatttcctccatgaattccgacccaccagaggacataacccgttgctttgaacccattttcagaaactcctccagaaaaatgtagagctcctccaaaccagccaagcccatcaagatcgactcggatgaacccgtcgtggtgttaattgttttaatcttattaagagattcttcgagcccacttgtgcttggttgtgatctagaaggtaaacttatagatcttaactgtttcttaatgatcatattcgccatcttttgtgttttgatataaggtgttttaagggtttttgtgttctttcttctttgatcgatctgttttattcaacttgccctacacatgcctatatatatagc

SEQ ID NO: 27482 - DNA, 501 bp, Arabidopsis thaliana
catcgggtaatatttggttggtggcataccatctacgttgggatagatactgaggaaactcaatccaatcacatgtatcactataaccacaagggctaaacattcgagcagcacgctcaccatcgttgtatccaccggtttgaaccaatgttccgttgggaagaaccgcaccagaagaacaccatgtatctgtttggacattcaaaggacggtatgtgttggagacaacatcgtagagaactgagtgtgcgctgcaatcgaacttttctgcggtgtcagtagggtcgtaacgacatatgctccgggtagagaaacatttgaggtaccgaaatcggtacggtcgaacattataaccatgccgttgtggaggagttgcatgtgcatggcggatataccgatgctcggtagcaacatttcccaccgatcgagttgcaatagaaaagggttagcttgacttcggataatatggccatggagaggcataagatggttgtagcgacg

SEQ ID NO: 27483 - DNA, 612 bp, Arabidopsis thaliana columbia
tattaccactgacctttggcttctgtggttgatagatcctgaacaatgacttgcagctgattcgggttaaaagtcgaaaaattgtctgaggaaggagatggagcaggaaaagtgaaatcggaatcacttgatgaagcttcagagttctcagagctgtcagcaagatcatcacgcacaactggcgctgaggccattgttgaagctgacatagaaggagatctcaagatggacttcagttgcgagaattggtccgacatagaatataacaacctggaatacactaaacaagacttatcatcattaaatgtactagatttattaattaaattttttaaccaaggagtaaaaattgtaggaaggaagataatctatggttgttaaaattacgattcaataatacctgttcaaagagtcttgtaactggtaaactcttctttctgtttcttctaatcttttacgtcttctctccccaagttctcgggcttcacacattttctttcggaaatgtcagctctttgttcccaacttgcaataaggcctgaaaaatccataaatataaaatttacctccatgcatttgatcaagatgatagcgcaatatattgtcaggata

SEQ ID NO: 27484 - DNA, 680 bp, Arabidopsis thaliana columbia
cacacatttattatataaatatagagaggtatagtatatataataaatccggaatggtaattataaaccataatattagtgtttgtgactcactttccagtccaagaaaatccacggcgttgagaaagttttggtgaagctcctcgtcccaaacgactcgtcttttcttggcactagaagcacaagcacgatcattatgatcatgacgatcctcctcgttgacttctgcttcaaggcaactacttcttttactcttgttagggtttcttatggtggaatctccgacagaggatgatttctcacctgctgctttctctgcctctccggtcaccacactcctcctttctctcatcttctttaccaaatgtttgaatactatccgtagatcttcgggtcttatcggttttataagatagtcggcagcaccgttaatcatccatttcttcaccgacttcactgaatcgtcttcagatattactgcggtataaaacaaggtgtgttttcttgttgcatatcgaatttacacttagttcaatgaaatgacatttttattaaaattatgatcggcttataaaactagtaagagagagtagagagacagacatcatgcgtgatgattgatgagtaagaggattagagctttatgtgctctgtcttgggtgatagatacttctgatgat

SEQ ID NO: 27485 - DNA, 469 bp, Arabidopsis thaliana columbia
gttttctcatatttgtcttggtttcttagctaatgtttttagtcttaactcacagtattcaatgatttatacaaacaattttcttgattttttaaataaaagtttctcttaacaaaacgtatagccaatcaatatttaccttaaacaccagagaaaaaggagtctttattcattgttattagttatttcaatacaaacaatagaaggggaggaaggatgttgcttaagctaatcttgaaaaagcatacgaccgcataagatggaatttcctagaggaaacgttagaggtagcaggattgtttgccaactggaggggatggattatgacttgtgtgacgggaccatgaatgagagtattgtggaatggggaacagacagcctgcgcctaggtgaccctttatctccatatctgtttatgctgtgttttgagcggttgtgtcacagatcgaaactgcggtagggaggaagg

SEQ ID NO: 27486 - DNA, 425 bp, Arabidopsis thaliana columbia
cctgtactccttgcagaagaggcatcggttgcaggtaaaggttggccacgctctttccttggcgtttaggagtttctcctctgcttggcaaattgcggactcgcctcttagcaggcaaggctgctggaagagaaggaacattggcttcttgagctgcaaagatgacatgtacaatacggaaaagatttagaaatcagagcagttttaagcaagttacgatgcttcatagatttataccttcaaccgtagaaccgacaggttgagaactcattggcagagtagcatcagaaggttgagaactcattggcagagtagcatcagaaggtgcagttgtcacaccttgcaaagctgtatatgttcgaccctcagaaggacttttggatccatcacaaacagaagagacggcattctgattttgcactggg

SEQ ID NO: 27487 - DNA, 1446 bp, Arabidopsis thaliana
ctcgagtctcagatcctttcacatacttcacagtctctctaattttctccaaagctccagatatcacttccaaaccatcttgaactatcaagtttaggatatgtgctgaacatctcacatgaaagaattctccgctgcagacaagatctttttgtagctttctctttaaaatgctttgcatagtatcatttgcagaagcattatctacagttaaagtaaaaactttcttctcaattccccaatctttcaacagctcactaagcttcattgctatagctactccagaatgtggaggcgggaaagcacagaaagataagatcttcgttttcagaacaccatcaacatctacataatgagctgttaagcaaatatagctgttaagcaagtttggtgtgggatatttctgtcctctatcgaagtttttccagcatgcagcacgaaatctacttacactacttttacctctctcaactgtccctgaagaagcagtgtcatgaggtagtatctgatccatttctggatcttcatcgtccatttcttgatcctcaagattaaagttgtcttcatcaaccaagttttgagtatccaattccatatttctgacacaaataaagacataaacacgtttagcagtgataaacaaagactgaacagaggtcaatgggctagctccattagaaaagtacataacatgtgggaatatcttatccactatggataaaaaaagaagaacaaggatccttaaacaaaagcaataatctagtgtttaaacaaggatccttaaattagcttacaacacaaagggtctctacatattgatgtgcttcaattcataatgaaattcgaaatggcgaaccataaacaaaatctgaaaagtgcccatttgctagctagctctcctcatatccaaaaagctaagattctttcagaaacactaacaattgaaatttggacaaacccacaagctagtagaactaaccggagtaggagttgagagagatgtcgagcttggtcgtcgccgagagagagctttgtcgccgggagagagagcgtcgttgccgagagagagagaagagaagaaaattgatgtgttgaaaaaattgatgggccaaccataaaccgtgtgggctagcccattaaacccatagacaaaattggtctttagaccatataccccgttttcattacgggccgaccatggactgtccataatattgtggactggctcagcccatggtcagatgaccatttgacacttctagacatggatcaacaacacgaaaatttgaatacagttaccataatcttgcacaactctccagattgttcccataatgtttcacaatatggtcatatactcatattgttatccacgtacgatgcatcaaaacaaaataatatcttttcaattcctacaaatatgactatatatactcacgccaaaac

SEQ ID NO: 27488 - DNA, 904 bp, Arabidopsis thaliana
cgtatcaaatagtgcaaatattaaatggttgcactgagggagaagttgcagagtagtagtatagtattatagggttatgtttcattgcaatttactttaagttatagttttcattgcatagcctggcctactttctcagaaaccaaacaataagctaaagatattaattaagaaaacacactttataccccacataagaagattcaattcaataaactataaccccacgcacgcaaaagagagagaaaaaacatggacaaagactgaacagagggtcaatgggctagctccattagaaaagtacaaaacaagagggaatatcttatccagtatggataaaaaaaaggagaacaaggatccttaaacaaaagcaataatctagtgtttaagcaatattcaattcacaaattgttaacttggttgactaatccaaatgtgaccacatcatatactagaagagctaaacaaacataaaaaaaacctgactttagtacctcgatttgagaaaagagaggatattgaccacgagatctgaagaaaaaatcgacagcgtcgttgtgagccgcattgttggcgatggttgaggaagtgggtctctgctggacccctccaatggcttgtttgcctcctttcacatctccagataaacaacctcccattctctctctctctatctctagatttaaaccctaaaaatcccaaatttggagtcagatcaaaccctagatgaattcgcaaaatttcacaatgcagattgtaatatgattaacacaggattctgcaacttctctagctctgtatatatatatgtatattgaaaagggatacgcgtaaaagaaaaatagaactggaaaatctgaagctttttgatttaaaaagcagagaagattgtctcaggaattgg

SEQ ID NO: 27489 - DNA, 978 bp, Arabidopsis thaliana
gtgaaaggaagctctaaacgttcataaacattagcaaacacacactaaacgttcatacacttagctccatacataaacaccaagctctacacaagtaattacaagctctaccaaaaccaaactctacatattctgtgaggcatttcatcaaacacatggttggcatcaaaggaagggagagagagaataacaaagaatagcaaacaagtgaaatttggacaaacccacaagctgaaatcaaagaaagcatatgcagaatcacaattaaggaacagaaaataacaaagcgatgaaattgcataaggacttagagaataaaatcaatgagactatcatatgaacgcatattttagagagaacttattctaatcaacggattcatattctagtagaactaacgggagtaggagttgagagagaggtcgaagcgagagagagagagcttcgtcgccgagatagagaagagaagaaaattgatgtgttgagaaaattgatggaccaaccatagaccgtgtgggctagcccattaaatccgcggacataattggtctttagaccatttaacccgttttcgttacgggtcgaccatggactgtccataatgttgtggactgggcttagcccatggtcagatgaccatttgacggttctaattccatcaccaagggaaacacgatttagaatcaccggagattaaccgcaaatatttcaactcatatggaagtctatgcggtaacaatgaaattatggctttgggaacatttgtgaatatcagacttgttaacaagctattaaatggataagtttgccctaagacagttcacattcctattgggtgaaaatctttttcttcgatgctgccatggtttgtgtttcttggcttaatttcccaaggaaatcttgtgggtttaatctgattgtataatgataatgtctgttttttttcagagatacaaagcagcttgttaggcacaatta

SEQ ID NO: 27490 - DNA, 1363 bp, Arabidopsis thaliana columbia
caatcatttctctaaagaccatcatatccacctttctgctaattctatgtgtacttccaggagtcttctcacaagatctcatatgacgattcatggtattagtaccatttcgtctcagattcaagtgataagtctgctcacaatatttgcatgtaacctcagttttcccattaggatatttctgtcctctatcgaagtttttccagcatgcagcacgaaatctacttacactacttttacctctctcagctgtccctgaagaagcagtttcatgaggtagtatctgatccatttctggatcttcatggtccatttcttgatcctcaagattaaagttgtcttcatcaaccaagttttgagtatccaattccatatttctgaaacaaataaagacatacacacgtttagcagtgataaacaaataaagcatgaacttgactaaatcactagccttctggaataattaagcatgaacttacaacacaaagggtctctacatattgatgtgcttcaattcataatgaaattcgaaatggcgaaacataaacaaaatctgaaaagtgcccatttgctagctagctctcctcatatccaaaattcacaattgaactttggacaaacccacaagctagtagaactaaccggagtaggagttgagagagaggtcgagcttggtcgtcgccgagagagagctttgtcgccgggagagagagcgtcgttgccgagagagagagaagagaagaaaatttatgtgttgaaaaaattgatgggccaaccataaaccgtgtgggctagcccattaaacccatggacaaaattggtctttagaccatatagcccgttttcattacgggccgaccatggactgtccataatgttgtggactgggcttagcccatggtcagatgaccatttgacacttctagattggaccatggtttaacacaagacgtcgattttgttcacagtcctctccgattaacatcaccaaactcgtcgacgttgagacacttcggttgagatgatgagcacggtggataagagaagaattccggcgataatatcttccgatttgatgatataaacgcgtgatgatgatgatccaatcgttcaatcgccatcgtcgagcggaattcacaagagagagaaaacgaaatcgataaatgaagaaaaaaacacgggcaaagatgattttttttttgttttgttaaaaaatctcaaccaattaaaatttgccacgtatccgtcctttaacatcatcaaaattcctaaaattaggtgcgatcctaagtatttatcacattttagatttaatttttctcaaaattacttaaggattttggttaaggatctgttaaggtcc

SEQ ID NO: 27491 - DNA, 558 bp, Arabidopsis thaliana columbia
ccaaaaaaagaatacaacaacttagttataaaaaacaaaatatattagaaaaagagattgtgaaaatatgtacctccattagttggtccaagaaaacgtttcttctcaatatcattgattagttgttttagtttcatatgaaaaacacgtgattcaatatctggtctagcagtcccagataaatcaccagtcaactctaagaactcactaatccctacccatattggttttgcagtcattgttatgaataaatatggatttccaaaatatcgacaaagagccatagcgtcttgatacttttcagccatgtatcttggactacctgtatgggacgatggcaatacaatacattttccaatacttcttggagcattatcacctctggacacagcatctctagcattattatatatatcagctcgaattgttttctgatttgttcttatccattgtaaacggtatgactttaacgttgtataagcatcaacaataaattgatgaaacaatctccacttttaacaatgatcgaatcttgacatttccgtgtatgaataagtt

SEQ ID NO: 27492 - DNA, 474 bp, Arabidopsis thaliana columbia
tgacaagaaaatgattttattaaattcgttttcgtcttagtctaattcagctataaagtataaacgttatgaccaagtccataatcaaatcatcatagtatttctccttaatcacaactacaagaaaaggaaatgggtcatgactttcttataaaacattaactaagatttgaccaaacataattttgtattatcaatattacaccataaatacggccacatatcctcctagtttcttcacacaactctcccctcaaaacattccatcacaggaaaaaaatggcgacacaaaatgcgattctgaaaaaagctctcatcattttcctctttactctaaccatcatgacaggaaccgcgttttcacaaaactgtggtacaaacgggtgtaaaggcaacatgtgctgcagcaggtggggatattgtggtaccacaaaagcctactgtggcactgggtgccagagtggaccttgcaac

SEQ ID NO: 27493 - DNA, 560 bp, Arabidopsis thaliana
caatcagcacttcctgatatcttaccttcaaacattgaagctattgctcattcttttagcttggtgcttctgtccttgcgactaaaggtcaacataaaagtttctcctcttttctggctctcttaatatttctctttcatagaggaagttttcactttcatgacgctatacttaaagcttctcatgattattttaattacagaatcctgatgacgggcttgttgttcgagccttccagcttctcttctcattgaggactctttcgttggaccttaataacggtactgattgatgaaactctcttaaactgatcaaagtttaagaaatcgcttatgtgcagtcaaactttctctttttcaggcacattaccctcagtttgcaagcggttgatccttgctttatccacaagtatgctgatgttcgctgccaaaatatatcagattcctcatatttgtgaaatgttgaaggccaacttcctggtgatgtgagtcccaatgtgttgttcagttatacttttattttaccatggagattgtgtacacttgattatatctcaaaat

SEQ ID NO: 27494 - DNA, 584 bp, Arabidopsis thaliana
cttcaattgtggtggctatagtcattctctaagagaatgtccaaggccttttgatcgatcagcggttaatagtgctcggaagcttcagaaatctaaacgaaatcagaatagtagtgggccccgtctaccatcaagatattatcaaaaaactcaaactggaaagtatgatggcttgaaacccggcacacttgatgcagagactcgtcagcttctgaatctgggggtaattttgaaccttttctttctgtgtataggttcttaccaatatgctcgatttcagatttcttagatcattgctttccttttgtgaaggaactagaccctcctccgtggctaaacagaatgcgagaaattgggtaccaccaggatacttaggtaagctttctgctctgttttattagcattcatggacatggaaaagaagtggattttgttggtacgcacaagagctaaactaaactagatgtcgcacactttccattgtgtgcttatgtctctagctccagaagatgatcatttgtctggaataactatgattggagaagaggtggagactcgggatgagatagagagtgaggatgggg

SEQ ID NO: 27495 - DNA, 608 bp, Arabidopsis thaliana columbia
atgatgttccagtttgagtttttcttgaagaacagttttgttcttgtcttcctacttttctttctttttcagtttaatatggtaaaaaacttcattttcaaattatgtactctgctttcttcaaagatattatttgtgtatcatttaagttattatatatttacttgtgttgctagattggcctagcattcgcgctatcatctatcattagcaaatcatcttcggcaacaactgttggtttccttgtgtttctggttggttttataacacaggtttggcctctcttgctaacatatatagtagctgaaattttggttcttatttaaatcttggactcttacgatttctacttcttattgcagattgtaacaactgctggattcccttattcaagcgcatattcgattggtagccgtgtcatttggtcactctttccaccgaataccttttctgcgggtctgcagctgcttcttgaagcgacatcatctcccggagactctggaatcagttggagtgaaagagcaatatgtgcagggggcgagacgacttgcgttattacaactgtatgccacctttctgagatagattttggatctaatagttgtgta

SEQ ID NO: 27496 - DNA, 556 bp, Arabidopsis thaliana columbia
tgtaagtcagaacatctggccgtaaacccgtcttctaacatctgctcgtaaacccaatcaatcagcttgtactgtttcacccctagcaaagaatgcaaaatggcattgtaagagtgtttataaggtcggtaattgaaagttttcgacttgatgaactgctcaacaacatctctagcaaggcctgcttccccgcaagtacatatcaatagattaaacgtgcatgctgttgttggataaccgtctttgatcatctcatcaattagcctgcacatggctttatactcaccacattcagcaaatatcttcataagtaaatgataacaattcgcagtgtgcctgaaattctcttgtccaccacaccacacaaagaacttgtaagcgagcttagcacaccttgttttattatcaaagctcagagttcttaagatcccaacaagaacctctctcactaatagccctgagattgaaacattcaattcatctaaagctgatttcgtattgaaaccgggacaatcttgctgtaacgtatcgagaacccgagacgcactgagtttag

SEQ ID NO: 27497 - DNA, 629 bp, Arabidopsis thaliana
  unsure (1)..(629): unsure at all n locations
caaaccaaaaagcacaacactaactttggaaacccattttctatctttcttgcaaatcaagatgacgcagaagctcgtacgccttgtgatcgtctctctggctattactgtcactttacttcaagcaaaaaccgataaccaagaaggtaaaaacatttacggattgaattattaaacgaacagttttgatagattaatcaaattaaccgatcaagatattaatcagacaagttttgacagtctccgcgttgaacgtaatgttcacgagcttaaattcgccgtcgaaactcaaaggttggaaagctaacggaggtgatccctgcgaagattcttgggaaggcgtcaaatgcaaaggctcttcggtcactgaattgtatataatcattaccctaatttaattacgagccatagtctcaaaaacttacttgtaccacaagtcatcttatattctttctttttttctctggcagacagttatcaggctttgagctaggtggattcgcggttatctctaagcaactcaaatctncacaactttgtgagaacctcatttaatagtctcgtttaaattagttnacaagtaatcagaaaataacagttttggtttttgaatatggtgatagtcagtg

SEQ ID NO: 27498 - DNA, 556 bp, Arabidopsis thaliana columbia
tagcgtaaagaaaatacctacccagcatccatatgaagacaccaaggtgtcaataatcaacagaggacgtgagttttagtaacaaaaacctatcggagaaccaaagcactgaatcatttgccagagttgtatattgtgataatgcggaaaagctaaatgacactaaccacaaacaagtatggaaagtgaatactaatgaaagtggggtctttggccgagtctttaatcaagagttgcttttgctactccataacaattacagaagcttttctaatcgatataaacctcatcactattgaccttgtttcttgaagctcaaatctacatcttcattcatctgcaccaaacagacactcaacacttgtgactttcagacagcttttctatcctgtaggactcgctgttaagacacttaccgatttctcaacttctttggctttatcttcgttaaacccgagcctctccaaaatctggcggcctgctgaatccttttgagacaaaccccagaagcaagtagggcgtggttagttcccatccacatctgtgaccaaatagt

SEQ ID NO: 27499 - DNA, 623 bp, Arabidopsis thaliana
aaactttgatgaataactaattctttttttagttattcttttcccctttactagtctattaataaccaaacgaattattccaatgtataaaaaaaattccaatggcttttgctactctaaccttccccaccactattttttgctaggtattttcctttactttgaaaggccttgatataaaaaaatagaataactacaaaacgtagtaaatagaattggataaatagtgggttccatcgtttctatggttacttctaaaacggtgaggtcctctctatacaccggagctccttcttttaattaatcaatactattggtaacttgtacaattcacattctttggctctaccccatgaatattccagtaataggtctttcacaatgagatcccgtttatacagtaacggtatttcattttgaaaattgattaggtcatttaccctgttagtccgttcttttctttcaagagtgaaatcttttttctaaaaaatggaattcccccgcttaatggatctcatttgttacattgggggtttctaaaaaatggagttgattggatttgcccaatgtaaccataagtttcagccaatagagtatatgacgatctatattttgtaaatatg

SEQ ID NO: 27500 - DNA, 537 bp, Arabidopsis thaliana columbia
tatgatttaagtgtggtagagtcttagagtagaagtaattagtaaaaatagcagaatgaggaaacaatgatgagagaagtttacttgtgggctaagagtaatgattttatacacccactctgttgagcctctagctgtcccgtctttttctcatcgtaactcattacttactttaatattggatacttgtttgttttggtgtgtgaatagggaggaatggtcaaccatcaccgagcttaacatggtcaacgcgtataaagatcgcaaaaggagctgcgcgtgggttagcttatctacacgagtgtagtccaaggaagttggtacatggcgacgttaagccttccaacattcttcttgattcctccttcactccttacatctctgacttcggtctcacacgtctcatcaccatcactgccgcttctgcctcttctaacgaaccttcctcctcctctgctgcgggtggtttcttaggtggagctcttccttacacttccatcaaacccatcagatagatccaacggctataaagccccg

SEQ ID NO: 27501 - DNA, 517 bp, Arabidopsis thaliana
acgttgaggagaaagaagcagaagagctagaagagaaacgaagtaaatcaaaagaagctgagaagaaaacttgtcattcgggttacacaaaagatgtaaaagctaagaggtgaacaagaaaattaaaaaaatctcccattaacatactcttgcagaaattcagatggttctttagcttgaaccaaggaagcttttgacgagctgagccacagaattagccaaagaatcagcatcttcttgagtggaagcctctgcatatactctcaccacatcttctgtacccgatggccttataaaagctctgccacgcgagtacttcttgatttcagaattaatagcatcttgaatccccataggtctcagagcctcggtttcttcgcttgtggtcacaaccgctgttctatctggaacttcgaccttgatctgcctgctaggaaggtccttgtatagctcattccacttctctatcgaccatcccaggtgttgtagaatccttcaacaagagcactcacttaga

SEQ ID NO: 27502 - DNA, 289 bp, Arabidopsis thaliana
ctttacatcattatatatggcttcttttcttatcgctgcatttgttttgttttcagctaacttgtcaacaaaggattatgcggatgagctagtggaacatccttcgggagtgtactttggttgggcaggcttggcaaagagaggtgtctttaaaatggtcatgagcattggttggaatccttatttcaataacaaggagaaaactattgtgagttcataaaaagttcaaacaaaattcttactccagtggttgcttctttaactttagcttttgttatataggaaccat

SEQ ID NO: 27503 - DNA, 524 bp, Arabidopsis thaliana columbia
ctggtttagatttttttcttccttatcttggattttctggtttattaggtttagaactaaataaaactgttatgtggttggtttgataagattttggtttcagttggaatatcaaaaaatatataatgggtcttcaaaacattaccattcgttgataataaaccctaagaaaatcaagatggccgacgacagcgcaacccccggtgtaagagtccctagccaccgctacggtcgtcattaccatcggcggaaaatcaaagaagcagtagactcaataagctctttacctgatgtgatcctccaacatatcctctcctttattccgaccaaactcgccatcacaacttccctcttgtcaaaacgatggagacatgtatggtgtgatacacttctctttcatttaatgattacagactggaggctccatttatagacgaaaccctaactcgctatacagcttccaagatgatgcgttttcactccataccagcttgatcaacaatgttccccacttagaaagttgg

SEQ ID NO: 27504 - DNA, 754 bp, Arabidopsis thaliana
tcatgaataagctagtaatttcagaaagagtgacccaagcagaaaacatagttctgaaagctaaactcttcgactctatattagtcccaacatgtctctagccacatgtgtgaagctcactgagaagtgagaggaactatataacttccatttcatttgaaagttgcaaaaccatgaaggaagattgacaagaagagtgcttacagtgatttcgatagggacacgagtatcaattcgatgctgataatagagatcaatgcaggcaacatctactcgcattaaactagcctcacacgcagctcttacataagcaggatctcccttaaactctactttcccctctgcatacctgattccatatttggtcgcaagttccactttttctctcaccccatccttgagagcctgacaaaaatccaaactttcaacaaaaatccaaactttcaacatccaaatcatttatacagctctgaaactcagcgaatcaaggccagtgttcccatatcacaaggccagtgttcccatatctaaatcacgaactcaaatattaaaaaatatcaatatcaaaaggggaattatcaaaatcgaaccttgctgaggagaagctcgttggtctcaggaccgtagatatcggaggtgtcaaggaaagtgacgccggagtgaatggcgtggtggatgagagcgatacgttcggtttccggcttgggagtaccgtagaaagcagagagcccatgcaaccaagaccttgcgccga

SEQ ID NO: 27505 - DNA, 504 bp, Arabidopsis thaliana
tgacttcagaaaggcaagtgcagaggctttttggatgacttgtttgattgatgaaccttacataacctgtggataaatcaaatgattttatatataacctcaattattgcaggctctaccaagattccaacaggaaaacttggatcacaacaagattctctatgagacagtttctgcaatgtctgacaagacagggtgcactcccgcacaactagccctcgcttgggttcaccaccagggagatgatgtttgtcccattccaggaaccactaagattgacaacctcaaccagaacattagagctttatcagtgaaactcactcctgaagagatgtctgagcttgagaccattgcccaaccagagtctgtgaaaggagaaagatacatggccacagtgccaaccttcaaaaactccgacactccaccattgtcttcttggaatgctgtgtaaaactgtctgagagtttctctggccaaaggatgatttatgtatagaatatgtta

SEQ ID NO: 27506 - DNA, 702 bp, Arabidopsis thaliana
  unsure (1)..(702): unsure at all n locations
gcccgatttcgataggaacacgagtatcaatccgatgctgataatacagatcaatgcaggtaacatctagtctctttaaactagcctcacaagcagctctaacataagcaggatctcccttaatctctctgtttccctctgcataactgattccaaatttggtcgcaagctccactttctccctcacaccatccttaagagcctaacagcattcaaaatttcaataatgattgatcaatcattcccatctctaagttttcccaacagagaacgaattcaaatttgttggacaatttcttcgaaatttaaccatctaaaagcggaaaggtcagatggcagattggggaatttcgaaaatagaacctttccgaggagaatttcattggtttcaggaccatacatgtcagaagtgtcaaggaaagtaacaccggagtgaatagcgtggtggatgagagcgatggcttcagtttccggcttggaagcaccgtaatgaccggtgagtccatgcaaccaaggccttgcgccgatacctctaggccttgacttcctagctttatcccctcactctgcaagattccgccatggatttgcncacacaaatctctctctctatctctcgtgtacgaatggcgagttttgaattggagtggtcgagtggagtggtttaatttgcagatgagtgatgatgatgatttgacaaaa

SEQ ID NO: 27507 - DNA, 582 bp, Arabidopsis thaliana columbia
gatgagtacaaatgtttaaattggctagacaaccaaccattcgggtcggttctatacgtatcctttggaagcggcggaacactcacgtttgagcagttcattgagctggctcttggcctagcggagagtggaaaacggtttctttgggtcatacgaagtccgagtgggatagctagttcatcgtatttcaatccacaaagccgaaatgatccattttcgtttttaccacaaggcttcttagaccgaaccaaagaaaaaggtctagtggttgggtcatgggctccacaggctcaaattctgactcatacatctataggtggatttttaactcattgtggatggaattcgagtctagaaagtattgtaaacggtgtaccgctcatagcatggccgttatacgcggacaacaagatgaacgcattgctactcgtggatgttggtgcggctctaagagcacgactgggtgaagacggggtcgtaggaagggaagaagtggcgagagtggtaaaaggattgatagaaggagaagaagggaatgcggtaaggaaaaaaatgacagagttgaaagcaggatctgttaga

SEQ ID NO: 27508 - DNA, 520 bp, Arabidopsis thaliana columbia
tggctattgctctatctggacaacctcttcttggtcagcctgttatggtaaaaccttctgaagctgagaagaatcttgttcagtcaacaactgctgctgctggagcaggggggatgttgggcccctactccgggggagctaggcgtctttatgttggtaacctccacattaacatgtcagaagatgatttgcgaaaggtaaacaatttcttttcctggcagctgctttatgttttataaagaggaagttttatttgaataaatgtcagaaaatcgtaagagcagagtttttcctgtatactacaaatcatatacttattaatcatagatctgttttgcaattgctcattttcggatcatagttcgcgttcaggtgacatattatgctttcttttggcattcctaggtatttgaatcatttgggagtgtggagctggtgcaagtacctcgtgatgaaactggtctctgcaaaggatttggttttgttcaggtaggtagtgcggtgtcagttttaatttttt

SEQ ID NO: 27509 - DNA, 553 bp, Arabidopsis thaliana columbia
cacgtcttcgtcatcgtcatgaaccttggctggtttcaagaacacggtttggttggtggtttggttctggtgcgccttaggggaatcggaccggcctggaacgggaggtttgtaagaacgaaccacgccgttcaaacctggctcgagacgagcgtattggcgattatctacagaggccgccatgttggaaagtgtataatcgtaaataatgtagaaagcagagcctttttctctctctatctctctcttgtgagtgagatgagatctgaggacgaaaatgcatcgttggtggagatgaagttatataggagagagcctagtggtatgcttttaggaagtatcgtgccgaatcacacgtatgggaccatttgtgactttttaatttttttcttacacacttactattaattttttcttatgacttgacttaattaaataaaccatccatttgtttgacaaaaataaacgatcatagttattcaataagcttaaaatgatcatttttgccctatttgttataaaacaaatgtgaattgttggagtagttttgtaa

SEQ ID NO: 27510 - DNA, 120 bp, Arabidopsis thaliana columbia
tgcaaagatatttccaggatgtggatctccatggaacaatccaaattccaacagctgccttagagcagcacttacgccaacagtcaagaatccatttaaatcaatccctgcatccttgat

SEQ ID NO: 27511 - DNA, 528 bp, Arabidopsis thaliana
caatcttggtccggatgctaagaagcctcttcctagagggctataagctacaattccaatcccaagttccctagagaattcaaaagagacttgttatgaattaaacatgttaacaaagacgaaacttatggctgattctgattcctcacacctgcaggttggaatgatatcttcttccacgtctctcgaccataaggaccattctatttgcacagcggttatcgggtgaacagcatgtgctcttcttatagttgaagccgaagcttctgacaaaccgatgtactttattttgccttcttcaactagcttcttcagctctccaatctttgaaaatagattcaatgaaaaccataagttcaacaacaactacaagataacaaattataaagcaacaagaatcagcacaagtaacagagtattgcatgcatatctctaactatccctagttggttctctatgagtaacatttaacacatattgaaacagattaaaagcaagaagcgatacagtgatttcgatgggcagagt

SEQ ID NO: 27512 - DNA, 611 bp, Arabidopsis thaliana
ggactgtaagaaacaatcccaattccaagttccctgaagaaaggaagacaagacgttacataattgatggatttatgcatcatgaaaggatgatgaaatctgcatacctgcaggttgggacaatttcttcttccacgtctcttgtccacaaggaccactctaactgcacggcggtgattgggtgaacagtatgcgctcttctgatagttgaggcagaggcctcagacaaacctatgtactttattttaccctcttcaattagcttcttcagttctcccatcttggtattgacaatcaaaataaatggtttaagtttagcaaaaggtgccagctttctataaaggtcaggaagtgtaagcgaactagagagcttagaaccaacccttaaggagtctagtcaaatgaaaaatcattaggggagatgataaaaaaccacactggaaggaaaagtaactaagtaagcatcccacatcagagagaggaaacaatagtaaatggcttatactaaatatcatttcatcagaaattggttctatatgaataagttagcactttctgaaagaaacctacgcagaaaccaaacatataccaagccaaagatgtgaagcgga

SEQ ID NO: 27513 - DNA, 581 bp, Arabidopsis thaliana
tatttataaaataaatctgacaaaatatattaaattaaatgatttatatccttaagtatctcttaatcttatctttttttaaatacattttagaaataaatcttatctttgtttagctacattttatgagttgttaattttctaaaattaatctatttaatttaaacataaatatctgatttctttttttaatttgacttgatcttatattttatttcttcttcacgaacttcaagttatctccatagggagcgtagacgacaccagaagatccaaacacgagggactcatctatcgcagcagcaccgcgagaggatacgttcatgtcgtgggccctgaagatctcgccggccactgaggccgaggaaacaaggatgatggggaagttaaagtgtaagttttctggttttgtagagtgtaaaatgccaatatgttgtgaaagacataatcttgttgtatgtaacacacaaggcctaaacaaaaataataatatttcaaagttattgccaacacataattacacacaagaacaacacagtttattgaagaagcaatttaaaccaaaggtaaccagtaaacag

SEQ ID NO: 27514 - DNA, 738 bp, Arabidopsis thaliana
tcctttcctgcatacaacaccaaacttgtcatggcctataacaaaatgactaaaagattaatgcttttttttaaggtaacagaaggaaggagatagaacctgtcgggagtgatagtcctgcgatgccctagaaatctgcggtgaccttcaactgctcttgccatgtttccagaatgtgaaggaacaaacacatcactctcaacagaaattatgtaatcaagagcagccgttttagtcgcatggccagtgaaaccttttaactcttcgttcccagcaagcgtttcctacaaaatccagtacatgaaacataaacatttatcatctttagattgtcagtaacatgaaagattagaggtggttgaacagaccttaaaaaccagatttgggaagcgcgacttaagctcagagagtctatcatcacccccatagatttcccctgctgcaatatatatgactgttgactgagaatatccgagacctttcagaaatattcccacttcttttggagtcaatggacaaaggccttcctctctctgctctgttgaatttatacttttgatcttccaatggcttgtactttccctgtgaccaacagataacatattgagcttgaaactgtaattttatcccatgaagacgttttgcatgtttgctttgttaagaatagatgcagagagtaatcaattaccgcattactctcagttcttcggattcagcatcagtgagaccataggtgca

SEQ ID NO: 27515 - DNA, 1331 bp, Arabidopsis thaliana
cttcgaaaagaggcttcaggaatgtgcaaagtgcctccacatgcctccaatcctctgctgaaggaggtttcttgtagtcaggatcagcagtgtctaagcacgagaacacttcctttaattctgaagcagccacaagcatcatatatgttgtgttccattgcgtctgatcatcaagagaaagcaccttctcgcttggaacttgaagctgttccttgagctcagtaaacctctcctcatgggactctgacgttttcacatgcttcacactgtcccggatgttcttgatcacatctttccctttctccaggacatctttagcgaggctaccaaatgttcgggcaacacaattccctattaccaactgaccatccagaatcccagggttcttgatgcagagttgaggtctgatgttttcaaccgcagagttactcgccgggtggttaaaggtgacgttaaacaactttccctccagaccccattcagaaacacaatttgcaaccgcgagactcaaggcttcgtcagcttctggatacgattccatcaaaacattgagaagcttcttttgtatcttccaatcgctgtcaatgtagtgagcagttataaacacatacccaagagttagcttggaggtccaaaagtcgagcgttagacagaagcgtccaggaatcccttctaaagacttcatgacattctgcttttcagcaaggtaagtcgccacacagtctccttgaacattgttaaagctcacagcatcaaagtgaggctgaatactctgcacgaacgagacaaaacctggatgctgaaccatgtgaagagggtagtcatgcataatgatcatcttagctatctcttgacgacacttgtcctgattaaacgcaacatagggactagcgttgttctgagaccggtaacgccttctcggagtgtcagtcttgggagtgtaaggagtagacatcagtgggttgttgtcattgtcatgcgtatggataagtgcaggacatgtccccttaaaaatgtgacgcttaagatggctagtaccagccactttgttaccgttgctgtaagcaaaactctgattacatcctttgcaaaaagctcttctgcagttcggttctaccgcctcgattgtgaaatgttcccacaccatcgacttcttcttgcgtcgcttgatcggttgggtctctggtgaaaccatttcagtgtcattgtacacttccaaagctgtttcctctattggttgtgtctctggtgaccttatttcagcagtatcattgtacacttccaaagctgtttccttgattggttgtgtctctggtgacctcatttcagta

SEQ ID NO: 27516 - DNA, 682 bp, Arabidopsis thaliana
tctgattttgttctcacagatttgatttgttaattgtcttcttctgaaacttctcaggttcatttggtgactgatcagctgaccaataaacccaaaggatatgctttcattgagtacatgcacacccgtgacatgaaaggtgccctcacatctcttttctttcaaccctcttttatctccctgagatgtttgctctttatactgatgttgcattgtgttttgctactcttcctacagctgcatataagcaagctgatggacaaaagattgacggcagaagagttttggttgatgtggagagaggtagaaccgtcccaaactggcgtccacgcaggcttggtggtggacttgggacctcaagagtgggtggtggtgaagaaattgttggggaacaacaaccgcaaggaagaacctcccagtcagaggagccatcgagaccacgggaagagcggtaaagatattttcattcgtaccaaactcttttgccttgtgactaatattgtgctgataatgttgttaccttgtctccagtgagaaatctcgggaaaagggaacagaaagggaaaggtctcgtgagctgtctcacgaacaacctcgagagaggtctcgtgacagaccgagagaggataagcccacagagaccgagaccaaggaggcagagacagggatagggacagcagac

SEQ ID NO: 27517 - DNA, 1049 bp, Arabidopsis thaliana
taaagtatatcggtttgtctgaagcttcacttcaactatcagaagagcacatgctgttcacccgataaccgctctgcaaatagaatggtccttatggtcgagagacgtggaagaagatataattccaacctgcaggtaaccagatttcatttcatcctcattcttgatgcactatctattaaatatgtaacatcttctctctctttcttcagggaacttgggattggaattgttgcttacagtcctctgggacgaggtttctttgcttcaggacccaagcttgttgagaacctagacaataatgacgtcagaaaggcaagtacacaggctttatatgacttgtttgattgatgaactgttggtaatcaactcactgtttatctgttcaattctgtttcttatcgcagactctaccaagattccaacaggaaaacttagaccacaacaagattctctttgagaaggtttctgcaatgtctgagaagaaaggatgcactcctgcacaactagcccttgcatgggttcatcaccagggagatgatgtttgccccatcccaggaaccactaagattgaaaacctcaaccagaacattggagctttatcagtgaaacttactcccgaagagatgtctgagctcgaatcccttgcacaaccaggttttgtgaaaggagaaagatccattagcatcctgaccacgttcaaaaactctgagactccaccattgtcttcttggaaagccgcttaaaatcgtctgagtttctctgattgttgtggggttcatgtcatttaagtggtctaagttatgtcagctagatcaaggtaataaaagtgctgtgtcttcgagagtggattatggtaggttcattcccagggaaagccaaaactatcaagggttgatgcctttaagagtaaataatgtatagagtccccaagtgagaacttcaatttacatttcatacattttgaccagactctatacagagagttatgtatagacttttagtttgctaaaaatgttaatctgcattatatgcgtaagaggctttta

SEQ ID NO: 27518 - DNA, 1251 bp, Arabidopsis thaliana
agccatgttgcataatctcgtcgtcaccccgttcgtcgtcatttcgcagctttgttaaagatcaatccattattcaccatcaactagatcatttccatttcaaaaccaacaaagtgtgtcattggagaattgatctacgtccaggagagtagacttctggacgtggatctacgctccaaggacactttgttatcaggttttcattacatcattcaaagatatcattttcattgagtttcttcccaagtctaaaaaaaaacagtcatttatctgagctatctagcagagatatattacaactccatccataaaaacggaggtataactttttccttcttctccattgcataccacatcttttcctcttcgtagcaatacttattcttcaacgtgttggttgaattaggtccttcgtcatcttcaggttcagatacaaaggaggagacggagaaggagatcaatgggaacgagaagaaaaaaaagaagaagaagaaggacgacttgttttcatgatcagagcgatctgttcaaaatgttttttgtcacgccccaacagccctatcaatgggccccacgtcctctctcgggtccatgggctcacccctgtctgacggtcggtacgctacatccgggattaaatacttgttaccgaccctataaattaccatatgatctttttcatgttttgtcctcactcatatggttccgacaatcagtttccggaaggtcacttttctaagttaagcatgcttaattatggagttctctcaggacgtctaaccgaaaagataagtgtactttggtgcataggtggctaaatcaatacttttaaatttctccacatgcaccaccatattcctgaaactaaaggtgttatatttttcaaattaaaagaagcttttggtctattgttgagaagacaaattatttggtcttcatgatcagtgcattctaagtttggtctctttcttgcatataaatttgttatataggtagagtttgatattatggagtccatgctggaacacagttaactgattatgatttatgaagcatttcattttcgttatgattgttttattgcgtttcagctatttgcaatttaagaaatgatctaaggtgtttttgctttgttaccgttcggttttgaagtcatcgactcttctctagattttcatatttgttgctatcttgtttacttcagtcgcagcctgcaggatctatctttggttctgatctcagaagcataca

SEQ ID NO: 27519 - DNA, 1226 bp, Arabidopsis thaliana
caggagtgcaccctttcttctccgatattgcacaaactttttcataaacaatcttgttgtggtctaagttttcctcttggaatcttggtagagcctgcaataagtgggtttatataaagccatttgattaatccacagcttatctaaggctcatcagcaaacaagtcaaacaaagccaatgtacttgcctttctgaagtcatccttttctaggttctcaacaagcttgggtccagatgcgaagaaacctcgtcctagaggactgtaagcaacaatcccaatcccaagttccctgaagaaggaaagagaatttgaagttacatgatcgacagatattgcaccaagaaaatcggatgacatctgaatacatacctgcaggtcggaatgatttcttcttccacatctctcgtccacaaggaccattctatctgcacggcagtaattgggtgaacagcatgtgctcttctgatagttgaggcagaggcttcagacaaaccaatgtactttattttaccctcttcaaccagcttcttcagttctcccatcttggaattgacagacaaaaaaatggtttagtgcagcaaaagatgccatctttaaataaaggtcaggaagtagagttcagaaccagagtctattcaaacgatttcattagaaagttatcaaaaccattaagtaggaatggcaagagggctaagggcttacagtgatttcgatagggacacgagtatcgacacgatgctgataatagagatcaatgcaggcaatatctagcctctttaaactagcctcacacgctgcccttacatactcaggatctcctcttacctcagaaatttccccctctactataaagaatccaaatttggtcgcaagctccactttctccttcaccccatctttcagagcctgacaagaaaatgaattgcaacaaactttctcatacaaaatcttgttgtggtctaagttagtaccatagaatcaagaaacagaacaaactaaagtatcttgatcactctttcgaacaaaacaagataaactcgaacctttccgaggagcaactcgttggtttcaggaccatacatgtcagaggtgtcaaagaaagtaacaccggagttaatagcatggtggaggagagcgatgggatcagtttccggcttgggagcaccgtatcgagcggagagggccatgcagccaaggccttgcgcagatacctcaaggccttgg

SEQ ID NO: 27520 - DNA, 563 bp, Arabidopsis thaliana columbia
tccttcatcgatttgcttcaatcatctatcggcgacgagctccatccggtttgtctcctaatcagaatctctgatttcccgatccggctaattcctcatcgtcggatcaattagattatcttatcccaaggagaggagtgtgtgtgaatcggagagagcgagagacagagagagagagagggaaatgaacggtggtgatgaggtcgtcgcagcttcggcagacccatctctgcctttggaatggagattctctcaggtcttcggtgaacgaagcgctggtgaagaagttcaagaaggttacacatctctctttgactttgtctctctgtgcttttgattttcatcagctcactattcgatctattcggaattggggtttttgaatctggatatgttagatctattgggtgttctttgattgttcgattcaatgaaaaagttttgatttttggtctactttgtatctgggtaaattgaaagttgtaagctttgtagttgaattagagtcaatagtcgtttttcgtgttgctgaatcgatgttatactgaattttagttgaaatt

SEQ ID NO: 27521 - DNA, 719 bp, Arabidopsis thaliana
gttatgaaatctgagaaacccagaaacaatatttgatttcttcatttacccaattttaaagttttgatttttttttcttctcttcttcgttatgtcgccggaatcttggaaagaccagcttagtctggtttcggctgatgattatcggatcatgggtcgaaatcggatccccaatgccgtcacgaagctttccggtctcgaaaccgacgatcctaacggcggcgcgtgggttacgaaaccgaaacgaatcgtggtttcgaatcagcttcctcttcgtgctcacagagacatttcgtcgaacaagtggtgctttgaattcgacaatgacagtctttacttacaactcaaagatgggtttcctccggagacggaagtcgtctacgtcggatctttaaacgccgacgtcttaccttcagagcaagaggacgtctctcagttcttgcttgagaagtttcagtgtgttcctactttcttacctagtgacttgctcaacaagtattaccatggtttctgtaaacactatctctggcccatttttcactatcttcttcctatgacgcaagctcaaggctctctctttgatcgttcgaattggagagcgtacacgactgttaacaagatcttcgctgataagatcttcgaagtgctaaacccggatgatgattacgtctggattcatgattatccctcatgattttgccacttttttgaggacaggt

SEQ ID NO: 27522 - DNA, 508 bp, Arabidopsis thaliana columbia
cccatagtctctttctcttttgaggctgtgtagtagcatcaggagcatccccttctccatcttcctcgttaactacaaccgccataaccagagatgcaattgaatccatgttggccatgtactgcaaatggcagctgtgcggtgctctaagggtggagccacacaaggtaaggtcaaaggaaagcttttcatcttgaagcaccctagcatgttttgcattgcaatcaactatcatccggaccttgttcttcataaacagaaaacgggctgcttgagggatgtcggtggcaggataatgcagcccaagataaggctccagcccagagttttgtaacctcggagacaacctcaccgtgatcatcttcatgaaacttataagccatcaccctgtcataccccgtgagttcaaaaacctcttgaaccattgtatcacaaagcctttccatactcccgctgggtaaagattgcagcctagtgattgctttggcagcgagcttgtatgattgta

SEQ ID NO: 27523 - DNA, 439 bp, Arabidopsis thaliana columbia
taaatcatttgacttgaaattacagaaaatagaacaaagagcaaagagaacaattattagacactccacaattatttaaggagacacggagaactctacataagggcaaagatttcctgagaagagaaacaccatcactataaaatgttacataggaggaaatggcaaaacgttacccttttcttaggtaagctttgattaatgaatgatccaactcaattgctttgttcgcatctgccacagcctctgctcattgagaaacaaatcagacccaaatttaatccaaccaataaagttctatatacaaagttgactaacaagtaacaatgggaatgacaattcggagaatactatcctcaagcaagatatagttgaaataaagactaatcacaatggctgacaagtgtataaaccatgctaagagaagagaagcaaaaga

SEQ ID NO: 27524 - DNA, 487 bp, Arabidopsis thaliana columbia
cctctccttcaatttcttatacacaatttgtcctgtcacagtcaccatcaatattgaacagtgttcttatggaatttcacaataccacattgtagagataaagagagagaacctgttcttccaccggcaccggtaacgaggacggtgagaggttcagttgttgcggcggcggaaacggtaaccgatactcttctgttttttccggtgaacttacttggaccacaaatcgacgtagaatctgacacaagtgagcgaaattggagagacgacgaacgaggaactgagacaaaggaagaagctacagctccggatttgtaagtgttagcaggaagtagtggatggaagaatgttgtcgtcgtcgtcgtcatcatcgccattgactggagtttgatagctcagacgaagaagacgagagagtgagaaatatcgcaaaatttccgattttcgccacgtcaccttatcttttgaattatatttgtctttttgt

SEQ ID NO: 27525 - DNA, 556 bp, Arabidopsis thaliana columbia
tgttctgttctgtttttgtaagtattggaataatttcttcagaaatctctacttacattggtcaacttcctgctttatcagtctcagctctcagactttcgggcttatgaaggacaagacatgtacactggtgaaaaaatcataccaattaaggttttatgacgctagatatccttatccctctctcttttgtccatgagtgatttgttggaaaaaaagaagttctagaagctgataagctatctttctttcttttttgtgccagcttgatctccgagttaaccatactctcatcaaggatcagttcttatgggtgagaatacttggtgattttgaacaatttcaactattgtttgtactctttttctcagtgcagcttgattgccgttttgcaggacctaaacaattttgagagtgatcctgaggaatttgcaagaaccttgtgcaaggatttaggtgttgaagacctgaagttggagtaagataccactcaatttttacatttcatgtactaactaatgacctaagtttcaacgtttgatcaagtgatttttgg

SEQ ID NO: 27526 - DNA, 538 bp, Arabidopsis thaliana columbia
tgaatatgagaaaatcagctgagctccattcgtggttaataacatctaaaacatctaactttaacgttgacttaacacgtttcggtgcgtgccaacgagtcctcccaggctgaactaagaaaaccgatcggtaaaactcaactgtaaaattgtaggagctaaacctcacacccaaaaaccgtatccttttcgtaatattgttcccattgacttcataaacactccttttatcttccaaccctgtcatcaacatgcatatcaaagactcccactgcgtcctactcatcgaatctcccacaaaaactatccttttccctcttaatctcttcaatacatcacgtacttcaaatcttggaacagtacaatgcttaggcttccacctccacttcaaatactcatcgtgtccacgcccattccctaagcaattgaaccctttctctacaaatggacactccgaagcgttatataacgggtagttatcgtcaacaatccaattcccatcgaagatatcacattctgtatccccacaacagagctg

SEQ ID NO: 27527 - DNA, 1051 bp, Arabidopsis thaliana
tttaaaaaattggtacttatgcatttagctagggggtgacccgctattaagctcttcttctcttgcataacagtgatgatgaccgcaatttttcgggagctaaccgcttgccaaaactgccatggatccgcaagtataaaggcttctgtcatcttctctcgctccaacacttccattctattaaaaatctgttaatcctaataacagagatgagtgactttttcaaaaagtcagtacaagatatcgccttgggcatcaatgatgaccctatcactctgtcaccggagttatgctctcaagcggcatctgtaaaccgtttctctctcattgccacaacagtgaatccgagaaagcaaaatctgagggtgctaattggtcagatgccttgcgtttggggatttgcagacatgtgtaggacgaatccttggacaggggaaagtccagttcaagtttcagaccgaagaatcaatgaacttggttctgcgaagaagccctatgttattcgacgattggatgctttcaattcatcgatgggatccaaacatcagtgatgcggagatgaaaatcatacccttctgggtcaaaattcaaggtattccccttctctacttgacaaacgcaatggctcgtgctgtggggaatcgactaggatatgttgatgatgtcgactttgacgagaatgctaatcatgtgggatttgtaagggttaagataaactggaatttagatgacccacttcgtttccagaggaactttcgtttcgatgcatgaaagaacacaatcataaagtatagatttgaaaggctaagaaagttctgcactaaatgtggatccttgaaacatgatgtcgaagaatgttcattggtgtttgaagaggctgatcctgcagagtatgatgaaggcaataatgatgatcatcacaacaatgatgagtgagacaacgagatgtataatgatgactctattccaagcgttgatccgacaactctaattcccggaatccaatgtcaaagcacagtggcacatagcaccaatctcccctctgattcag

SEQ ID NO: 27528 - DNA, 563 bp, Arabidopsis thaliana
caatttgtttcctgacagattcagggaattcaataactttaaagatcctaaactttccgggatttcctcagagagtgagtttccagcaaagtttagatcaaccaaagatgtgcataagcctagtgactttggtatagcaccagatagattattctggtcaagaatgagacttgaaagctccttaagcttaccaaaagattcaggaactatcccggaaaacttattcattcgaagattaaccgacactaacgagttagctcctgagatctgaaacggtagagaacctgaaaatctattattgctcaaatctaaagaacctagagacttggcattaccaatatcaccagtgaggtttccttcaaaatagtttgaagcaaggtcaagaaactgtagattaggaagacccaaatccctgaaggaatcattccagagagagagttgttacttacacgaagacgaatcagagtcttacatttagcataactctctggaaattgtcctgtgaatctgttctgcaacatgagaagatgcgtcattacgcctttcttgcacatataaggagg

SEQ ID NO: 27529 - DNA, 593 bp, Arabidopsis thaliana
gcgccattgagttaagcggtgatgcgatcgggcaacaccctaagcttcttcggatggttcaggacgatctatttcaccatttaatccattatggagcttcttcaagccctcttgtgctatcaatgatctgtagttgtatactcaatatatatcacttcctccgcaagtaagtcctctgttttttataacattaaaacctaaaactctgtttattctcaactttgtctaacaacaatgtgttgatttattaggttcatgaggctacaactcgaagctttcttctccttcgtgttgttgagagttacagctttcacaggcttccttccgttacaagaagttgctcttgaagggctaatcaacttttgtcgacaacctgctttcatagtcgaagcttatgtaaactacgactgtgatccgatgtgtagaaatatatttgaagagaccggaaaagttctatgcagacatacattccctacctctggtcctttaacctctatacaaatccaagcctttgaaggtcttgtgatcttgattcacaacatcgccgacaatatggatagagaggaagatgagggtaatgaagaagatgataa

SEQ ID NO: 27530 - DNA, 1134 bp, Arabidopsis thaliana
gaatcttgaatatcattttaaaagttattatcaggacggatttagtgatggaatgcaaattctaatactgggtatagaatgaccgtggaggtgctggaagatcaggtggttcgaggagatcatcttctggcttgagaccttccaagactctgtttgtgatcaacttcgatgcacaaaacactaggactcgggacttggagaggcactttgagccgtatggtaaaattgttaatgttagaatcagaaggaattttgcattcatccaatatgaggcacaagaagatgctaccagagcactggatgctacaaattccaggtttctttctgtccatctttacactctcatttgtcccaaatgttttccttcagctcccattgacctttttttgttgttgttgttgttacagtaagctgatggataaggtgatctcagtggagtatgcagtgaaagatgatgattcaagaggaaatggatacagtcctgaaagacggcgtgataggtcacctgataggagaaggcgatcaccaagtccttacagaagagaaaggggaagtcctgactatggccgaggtgctagtccagtagctcacaaaagggaaaggactagtcctgattatggtcgtggaagacgcagccccagcccttacaagagagccaggcttagccagattacaagagggatgaccgtaggagggagagagtggctagcccagagaatggagctgtaaggaaccgaagcccaagaaaaggacgtggtgaaagcaggagtcctcctccatatgagaagaggagggaaagcaggagtcctccgccatatgagaagagaagggaaagcaggagtcctcctccatatgagaagaggagggagaggtcaaggtcaaggtcgaagtcaagccctgagaatggtcaagttgagagccctgggcaaataatggaagtagaagctggaagaggatacgatggagcagacagcccgatacgcgagaggtaccacatcccaagctatctttagatcacatttgaatggtacaatatcacatcttactccagtgtttttttgtggttttgaactgaacagccctctcgttcgctgccacagaggaatgattggagatcagacagatgattgtgtt

SEQ ID NO: 27531 - DNA, 517 bp, Arabidopsis thaliana
tcacctgcttcactgatcttcctgatagcattattcacagtatctgcaacatagatatttcctctatcatcaactgtgagtcccttaggattgttcaacctcgcgtcccttaatctaccgtccacatgacccggatatccttcaggggagccagtaactagcctgggtctgctatctgccattgctcaaagagttacaatttgctgttcaagaattcatcaactatacatacacagtccacaatcaaaatgcaaaaggtgtttaatgttaaatgctgcatttaaaacattgatttgaattcttgactactttcattgaatccaaattctcaaacaaaagaaaaacgtcagaaaatctcctgattttcaaataacttttacctaaaatctgtgtatttccatatacagcaaaactttatagtccatgtgaactatcacgtgaaagcagagaaaaagaaaaaagcttgacttcatcatcatccgtattcaaaatccttaagaaaatcagcaaatattga

SEQ ID NO: 27532 - DNA, 630 bp, Arabidopsis thaliana
tcgactctagatacaactaattaacacgtagttttttttcaagatccaaaccgttttgttttttggtaaaccaagatccaaaccttattagtaaatatttgttcatgatttatgtatatgattaagaagttataaaaaccttaatcgctgtcgctgtcactgctgctgctgtggtgaccatcatcatgatgtttcttctccttcttgtccttcttctttttcttctcaccgtcgtggcttttgccttctccgtcgtggcttttaccttcaccaccgtggatcttgtctttgatcttgtcaacaataccttctttgtgctcaccactcttgtgctcgtcaacgtgtttcttgtgttcctcttccttcttgtgctcaccttccttgttgcctcctccaatgtggagtgcgtctccgatcttgttgatgagtcctgccatatctttcttttttctctttcttttgtattaaatctctcttttatgtgtttggttgctttgacgataaacttggatctcaaagggtctctatttatagccaaaatggataattatactaatctatcactacaatgagatattagtattggttggtattttcttagagattacttatagtagaaagaagatatat

SEQ ID NO: 27533 - DNA, 544 bp, Arabidopsis thaliana
gaacaaaactagtgtcatcacctatgctggttctcaatgttttagctgacccaacaaccctctttctccaactgtcgcagaacattggcgtatcacaagatattgcagaacgggaaggaatgtataattccaaatcatcaagaggcttgtagtaatcattccaagctgcctcacgtgagaggtttgttcggttaacaggacaatgcacatcctgaagcctcccaaactgtgaagccacccgattgggatagtaatgctccaaactgtcaatgccaacaagctgagacaccataatgcatcgagcaaaggagataaattcatcatcacggttgggaacaagagtcacccacgtcgctttctcaggataaaactgaggaaagtcccagtttttcagagtttttgtgtatggacaccactcaaaaccatcgattttcgagttgttcagaatccgctttgcattgctggttctctgtttcaggtcattccaaagagccaatcttggctcaccttttaacaacagattgggttttgattgtagtgcctg

SEQ ID NO: 27534 - DNA, 539 bp, Arabidopsis thaliana
gtgaaaatgcattgaatcataaataaccaaaataatggacttattatagaacccccaaatctcacccatactattttgcctatatatgttatcatatcgactcggttccatcaacccggcttctcttgctccggtgctttccattgcggtggcgcctcggaatgccgccaaatctgaccggatcataaaccctaagcctttgagcctcagcgggattcaccacacactccgataaagcaacattgtacctagcccgatcatagcaatatgaatatgtcatgagtctccgtctgaaaacatccattttactcctttgtgaaggagtaatctcttgcgccgcacgcatatcctcagccgcgccttcatcgcacctcggaaactgctcgatagggtccacggggcagccgtgcaggactagatccgagaaccgcgcaatgtaaggcgcatatttgtagtttacaccgtactttccaccgttagttgcccatttagaacagtccatattgttgtgtagagagacatcgggcttgatggaaagt

SEQ ID NO: 27535 - DNA, 925 bp, Arabidopsis thaliana
tagaccagttcaacaatattataggttacaacaaatgtagtcatatttgtatggttaaactcttttgacaaaaataatttggatcctaaattttttgctatgtttctatgggtcatgtgcaatagaacactatgcaaatgtccaacagcagcactgactctgtagcatgcttattttaggtctgtttactcagttggttgcggtttgggaggcaaacttggtcatgggtcaagaacagatgagaagtatcctcgggtcatcgagcagtttcagatattgaatcttcaacctagggtagttgcagcgggtgcttggcatgccgcggtggtaggtcaggatggaagagtgtgcacttggggttggggaagatatggatgtttaggtcacggtaacgaggagtgtgaatcagtccctaaggttgttgaaggtctaagccatgtcaaagcagttcatgtcgcaacaggagactacactacttttgtggtctcagacgatggtgatgtttactcgtttggctgcggcgaatccgctagtctcggtcaccatccatcctttgatgaacaggttagtgattggccatggcctccattgtttcttttgcttacattatatgttctaaacttatgtttagtcgtatgtctggtttgattttttgttgcagggtaatcgacatgcaaacgtgctaagtccaacggtagtaacatcgctaaaacaagtgaacgagcggatggtccagataagtctaacgaactccatatactggaacgctcatacatttgcgctcacggaatcggggaagctattcgcgtttggtgcaggcgatcagggtcagcttggaacagagcttggtaagaaccaaaaagaaaggtgtgtaccggaaaaagtggatatcgatctcagctagctagctgacttatgtggtttg

SEQ ID NO: 27536 - DNA, 1086 bp, Arabidopsis thaliana
tgagatgagaaaggttaccaagtgaagttgggatgtcaccaacgaaattgttatcagtgaggtcaagagatgtgagatgcaaaagatttcctagtgaagatgggatttgaccactgaaatgattttcagaaaggtcaagagtggtgagactagaaaagtttccaagtgaagataagatttgaccactgaaatgattatttgaaaggtctagaaaacgaaggttttgaaggctaaagatattacttttggaattgagcaggccatggaggcagctggagctaaggttcagctctatcacattccaaacttggcatcgcatttgataccatcccaagaacaacaatcgctgttattcgcccacgactccgtcttaagaggcccatcaacacacaaggcttttgaatctcaaactcgttcttgaactcgagaattgcgtctctttgttctggatgacacaagtttctattaggagctgctaacacgtctccataattagaagtgagaaagaagggaaagaaaagagtaataagaatgactgattgtgtccaagagtctttcatctttcttttaagtttttttacctttttgagtatcaacaatgaaaaagcaagaaagtggaaattgtaatgtgataacatggtttcattctcatatatatcacatgggttgactgactaacaagtctttctactaacttgtggtgatccaaatacgacttttctcaacggtctttatatacattaaacgagacatggaagagattaattgattttggtactgaaaaatcattttcaagtaaatttcagtagctgcttcctttattgacttatcatatgattttagtggctgcttcttttcaaaacacacaattcctagtctcctacacaaatatcttaaggttttaaaaccacacactaaccatcatatggtttaactatcccaaatcttttattgctttgggtctacaacgtgactttatagatccaaagcaataaaatccgttttatagacccaataggttaaagtatcttaaggttctggtgatttcatttggtttgatttctttaggatctatcattaaaatca

SEQ ID NO: 27537 - DNA, 432 bp, Arabidopsis thaliana
agcattgcagacagtgctgaatagagtgaacaccttcacaaacataacttacaagaacgaccccacaatcttcgcctgggaacttatgaatgagcctcgttgcccctctgatccttccggcgacaaactccagtcttggatacaagaaatggcggtgtttgtgaagagcttagacgctaaacacttggtggagatcggacttgaaggcttctatggtccctctgcccctgcgagaaccagattcaaccccaacccctacgctgcacaagtcggaactgacttcatcagaaataatcaggttcttggcattgattttgcctcggttcacgtctatccagattcctggtatgttttttaatgcaaaataccaagaaacagagactgccctgaatctgaagacagagaacagctagccaatgcagtaaatgattt

SEQ ID NO: 27538 - DNA, 901 bp, Arabidopsis thaliana
tcaaaaaccaaacgacaaaaactaatcacgacgacatagcgttgttgactacaaacagttacaacatcctactttgatagagattgtggatccactcttatcactcgtcagctggtggcgaacgaggagaccggctgcaacaacaagagaaatggtttacgattcatgtcatcaataatatataaacaagtatcgacctatttcagaatctaacctcttctgcattgggctctctgcaccatcatacccaccatcactgtctcttcttcctattgacccagggctttcaacttggccattctcggggctagacctcgatctctctctcctttcaatgggactttcaacttcaccaaccccatttctcggactctccttcttgaacgggctgtgattagggctcatcctctctctcttgttgttgggactgcggctgtacttagtagggcttgcgactctctccctcctgcgagggctatcattgcctctgcggtcacgaccatactcgggactgccacgtcttgatttcttgtaaggacttgggctacgtcttcgaccatagtcaggactggtcctttcctttctgtaggcagcaacaggactagctcctcggccataatcagggcttcctctttctcttttgtaaggactaggtgatcgccttctcctttcaggtgacctatcacggcgtctttcaggactgtgtccatttcctctagcatcatcatccttcacagcatactccaccgagatcaccttatccatcagcttactgaatgaaaacacagatgaaacgtgagtctaagaaaggaaagtgattagatactaaaatggacagaacaaacctgttatttgaagcatccaatgctctggtggcatcctcgagatgtagggggatctg

SEQ ID NO: 27539 - DNA, 520 bp, Arabidopsis thaliana
caggtttcaatctattggtctgtttaataaccataattttttattggtttgagaatcattgaccacacacaacttatataattcatgacgcttaagatcaaaacgaggctctagattaattgaaactcaaaaaagaaacataacacaacgatcaataaactgattcttgttttcccattggatttgggaaaagaaaatcataatacaacaagcagaatcatctacaccaatatgatcatattattaatgtcccaagtgcacagcatcatccacggctagtgccaatgcagcagcagcgccaacatatgtgtgtggagttagcttcaaaagttggtcttttgcttcttcaggcaattccaaacttttaataaactttctaatgctttcttcattcacagctcttcctcttgttagctcgttcagcttctcatacggctctggaacaccatatctcctcatcacctgttttttttatccttcagtaccaatgtacatggaataatacttgatcattataata

SEQ ID NO: 27540 - DNA, 416 bp, Arabidopsis thaliana columbia
tttattagctgaaaacagaggattaagaaacagagcagaacccttgctgaaacatttgtattttcttcactgcttcaggaagtaaaagctgaatcaatcaagccggagacaaaaacagagagtgtcaccaccgtaagcagcaaggaagaaccagagaaagaagctaaagctgagaaagttaccccaaaagctccggtaagcttactctttctgctgttttatctacataatgatccaatctacataatgatccagtagtggtcaattgtgttaacctatggaacaggaagttgcaccggataacgagtttgagaaacggataagaccggaagtaatccagcagaagaaattaacgtcacattcaaagacattggtgcacttgacgagataaaagagtcactacaagaacttgtaat

SEQ ID NO: 27541 - DNA, 353 bp, Arabidopsis thaliana columbia
actgacaggagataaataataaatctaacaattataaaggaagtataaacctgaagatgaagagcgatcttcttcatgttatcaacatattcagtaagtggtacatgaggtcctagtccagacgagtgaggcgccattgagtcgtttcctccaaaatagacaatgaccagagaaggttgtactgcagcatcctgcatccgtaacaagttgcaatttttaggcgacaaagtggaagaaaacagaagctttgaatatgatggttttctacaaagttaagctcattctacccaatttctcttataatgggtaagagccaacagcttgagatatcccgaaaactcggattaaacaga

SEQ ID NO: 27542 - DNA, 572 bp, Arabidopsis thaliana columbia
cgatcccccatatccaatgatttacgaaagtctatctagtgctacaaaccatatgtgccatcgtcttcccttctccagtaacgccgtagcgaaaaatctcttctcttcatccccctgttactacagcatgttagtattaagacaaacaaaaacactaactctggcagaaagttgagtagcagaccaaggtaaccaatcgctgtatagctgtttgtggattatatcagtgtgaccatcaagatgttcgaccacactgccttgataaaaacagaaatcccatctgcaaagtttcgagaatttagttcaggaaaagtaaacaatacccgcatttgtttatgttctacgattgttaatatcttaggcttgcttgtctggaaagaggcagtagtacttactctgatcttgagggtccaagagaaagaagcgtttggaaaatagtttctgaggttccacaacaacaccaacagccataatagccggatgatcatcccactgtgaagtcatgcaacaaaatcatcaaaacatgattcccttcaataacccaaaataccttttcaacagattaagagtga

SEQ ID NO: 27543 - DNA, 353 bp, Arabidopsis thaliana columbia
ctaaacaaagatccgcgtaaaagattaacagctgctcaagccttaagtaagtgtagaatgcatacaaaattgtttcaatgtgaaaagatttgtaatcttgtttattgtttcaggtcatccatggataaaggactcaaacgacgcaaaggttccaatggatattctggttttcaaacttatgagagcttatttacgatcatcatctctccgtaaagctgcattaagagtgagtggatcagtttttcagtatttcttacttaaaaggtcactttgtattcacttaccgatcgccatttgcttgcaggctttatcgaaaacacttacggttgatgaaatgttttatctgagagagc

SEQ ID NO: 27544 - DNA, 527 bp, Arabidopsis thaliana columbia
cagaattctatgtccagaaacacttgtataagacggttcttagaagcgaaaacataccaccaggaactttgccaccaccttgccatctagctgaacatacagctgcatcatatccagaaagtctcaaaagcttagcgagataaaacctgatgcaactagcgttacatgtaccggatttcacagagtgtagatctttctccttaatagtaagcatcaatgtacgaaccaccgagagaacctcggtttcgtgttgagccatagagtacttgagatactgcagatacaaacacatactcttaattcaacaaaatgttcttcaccattcctagaaacctatgtactaaaacatgccttccttcaaattacaacaaaccacaaacgctaccattctaacaaatccatgataatctctaaaattctctaatcgcgagtggaaaacaccgatgaatctaagctaataggataaatcaaaatggtgcgatggtggtggtactgaatcttatcggaaaggtaagaaggatctggga

SEQ ID NO: 27545 - DNA, 661 bp, Arabidopsis thaliana
aaaagaaaaacagaacaaaaagatcaattttgataccgaaagtggcggtgtgaaaagtagttagatcatcggcgatacttttcccaccggttatgaccgttttacccttgccgtccccgatgaacatcaagtttgtcttcttcctaccaactttcagattctcttcttcgtatcttcctgctttaacgtagatgacgaatcgtcggctactatgctccggggctttcttgatcgcctccgcgatcgtcttaaacgttccgctaccgtctttcgacaccgtgatatcagcttgaatcgccgacgttggagtaccaagaagctctctgtcttctctcttcaaccaattaggtaattcctctgtttcttcagtcccaagtaacttcctattattcaccaccggaactccagataaatccttaacttttccggcgaatatagccaaacaattactcaccatctccgacaaatctttaaccgctccgatcacttgatccttcacttctcctccttgaccttcaatttcatcgaatccgtcagtgcaagtgtcgtggttagtcatcgcagagctaagccacgtcatcacatcggaatgagactcatctccggagacgacaacgacggaggaaagagcgcgtgtgagcgcgtccactgaatcatcaag

SEQ ID NO: 27546 - DNA, 297 bp, Arabidopsis thaliana columbia
ctcccacataaatcacatgccctacaagctcatcattcgtaagtcggagctggtagaatcataaccgcaagagtttaaaaatctcgaaaacacttaccaaccaccgtcgaaggggcaaattccgggaacattcttcgcacaatgcttacaccacaccatggccctcctctaaaatctaaaactcaaagacaggggcttcaagcgaaaatacatacaacgtcagatatttttaagcgatctcacaaacctacaattgaactttcttaccagaaattgaactttccttaccggaaattg

SEQ ID NO: 27547 - DNA, 877 bp, Arabidopsis thaliana
gcttgtgcctttattaaagaggaaagttgcggtggattaaagcaccatcgtgcggagaatacgataaggctcttgcttcatttgaagttattgacagttgaatcgagccgctcaattggtcaattatggagtcaataaaggtttgcatgaacgcactgtgcggacggcctctacgtcgggcgagtggaaaaaaggctggcctatgcgatccggtgatttagcttctctctgcgataagtgtgggtaagggccttcactcttgtgtctaatttgaatacttttgcgaccagttcgatattcgcaacacttctgcgatagattagtgctgtgggtttgcttacaattagaacaagagtgggtacgtgaagggaatctatatttcatgattacttattagtaaactctgtgaatgttggtttttgataggtgtgcatacgagcaatccatattctgtgaagtgttccatgccaaggaatctggttggagagagtgtaattcatgtgacaaggtgacgaaaatccatggcttactacacatgtttttgcactcaacgtatttcaattgttttccttaatacgtatttacgtttttttcagcgtcttcactgtggatgcattgcttctagatttatgatggagcttctagagaatggtggtgttacctgtataagttgcgccaagaaatccggactaatttctgtaagacaatttcctctccatgagttaacttcttgcaagggatgcttccttggtcttggtttctctgtcactatactcatgtaatctctcttacagatgaatgtgagccatgaatctaacggtaaggacttccctcatttgcttcagcagagcatgtaggcagtgttcttgagaggaca

SEQ ID NO: 27548 - DNA, 1058 bp, Arabidopsis thaliana
tgacagacttgggtctgcaacaacgtcgtttagaggatgacgactatatagatgttattgatgaatttatggaggcagtgtatactcggtggccacatgttattgtgcaggtaaccgatgcttcatagatctctggtatatcaaatgtttcttattatgaaacttaaatgttttttctacccacagtttgaggatttccagagcaagtgggctttcaaattattgcagaggtatagatgcacctaccgaatgttcaatgatgatgtccaggtaatgagtcttccgccttagaacgattcttgtgaagattaaatactaattatttatttatttctgcagtatttttactatttttagagcattttagtcactactatttataaaagtatcatattttctgtgctcaatccatcatcttatcgttcaatagttattcttaatcttttttatacgaccagatgcattaaagagactgacgaagggaactcgaaatctaaatgctgatactagaatcttgtttttcattctatgttttcatgatctcgctcaggggacagcaggggttgctatcgctggtcttcttggagcagttagagcacaggggcgacctatgattgatttcccaaagatgaagatcgttgttgctggcgcgggaaggtaagccattctcggttggtgtttttctcgtctttcctggtcctagtttaccagaaattggtattggtaaaagattggtcttgctgttactgtttaattatttgttggtcagggatctttcgtttatttgttggttttgagtaatgtttgaagagatttaaaatgaaaactttcagctgcatcactgcataagttagcttagactacttatattagaatactgagcttccttgtaaaaatctttgatttcttcagtgcgggaattggtgtctaaatgctgcgaggaagacaatggcacgaatgttgggaaatactgaaactgcgtttgatagtgcacaaagcaattttgggtggttgatcgcaggtatgttttctatagtggagtaatgatttctagatag

SEQ ID NO: 27549 - DNA, 627 bp, Arabidopsis thaliana
tcatatgcagtgtgggaaatggtaagactgctagcttttggctcgataattggacgcctcttggccccttaattaagtttttgggtgatgatgagccgagaatctgccgtattcccctaaatgcaagagttgccgatgcttgcaaccatcatgactggactcttgtttccccgaggtctgattctgcggtgtcattccacagtcatttgaccaccattagtttgccaagtctttcctccatagatgattcttactcctggattgtggatgcgataaattgcaaagggttctcttctaagcggacttgggaagcgatcaggccgagagaagatattaaagagtggtacaaagcaatatggttcaaaggcgcaactcccaagcatgctttcacaatgtggactgcacagttagatcgtttgcctacaagaactcgtctcgcttcatggggtttaatgatcccatcgattgttgtctatgctctggttttgatgaatctagagaccatatttttcttcattgtgagtatagtagggatttgtggcatgctattcagcagaggttaggtctacacctacaaactttggctcttgggctggcttgttgacttggcttaggtgcaagactgac

SEQ ID NO: 27550 - DNA, 439 bp, Arabidopsis thaliana
gataaaagcagaaacacgatattataacatacagatgaggatactgtccagataattgcagcagctcttggtcagtaatcctaggccagtaacggggaagcaattgggtcttcccgcgaccttctggaggaggccgagcgacatgaatctgtgacaccaggctcccactaggctccatgccagcagcaatgggagctgaatttgcaggttttggaagcagctgcctggaccgaggggccagttggaaaatcgaattagtcttacttctgtcatcaacagcagcatcatgaaatgggcttgtcataagcgtaggtccaagtgaaatgctcaagtttggctgtgcagacaattctttcctttcagttttgtgtctaagagcatctaggctggaaggaagcagcgattcttcttgtttcatttgaagagaagaatgagtggg

SEQ ID NO: 27551 - DNA, 403 bp, Arabidopsis thaliana
cgatcgaccaggttacacgtcttacgattactacatccaacgacagctcaacaaaacgcttaaccctaggcttcgtacgatatggatgacacgagactgggaccgtaagatcaaagtgttctcaagattcttccaagatctgaaacgtcaaggcctcttatccaaagactctaaatgtctctgcctcggagctcgagtcgggcaagaagtggaggccctgaaacgtgtaggcgtaaacgactcggtgggaatggatctggtgccatatccgccgttggtggtcaaaggtgactttcatcaccagccgttcgatgatgagacttttgattttgaaatctccaacgtgtttgatcatgcactttatccggacaagtttgtaggagagatcgaacggtcactgaga

SEQ ID NO: 27552 - DNA, 559 bp, Arabidopsis thaliana columbia
tacaatatgacacgtggcgaaacaccaagactgaagcatagccactaaaatcatgcaaacttgtgtaatccgaaactttgaagcttttgcgaaaaaccaaccaacgtcacataatcgtcttcttcaactaacaaaatccaactaatcatcatctgtctctctggctctggcttgtgtctgagctcgaacttaaagaaaaagaatctcaccatgtctttagctccgagcagttatccatctctgtattcttcgccttcactgccaagaacccagcaaaccaagcaaaaccctagtttgatcactcaatccagtttcatttccgccaaaagtctcttcctttcgagcaattcggcttctttatgcaatacccatgttgccaaacgccggaatttagctttgaaggcgtcggagcagagtcttcagctaaagctgaagcaggaggagacggagaagaagaagagaagtatgacacatatgacactgaagtggagcagccttatggtttgacattcaggacaggaagagatggtggacttacattgatgctatcttccaggtg

SEQ ID NO: 27553 - DNA, 475 bp, Arabidopsis thaliana
acaaaacattgaatatgtatgatttgcgtggaattattaggccattacgtcccacaactttcggagctcatctacaaagaaaacaagattgcgtccaagaaagatttcattaatctcaagggtttaatggtcagagattttcttaaatcaatccaataattattagtttcacttgcactatatctagtgttttgatgaagactttgaattgtatatatatacagataggaaacgcgttattggatgacgaaacggatcaaaaggggatgatagaatatgcatgggatcacgcggtgatatcagatgcattgtacgagaaagtgaacaaaaactgcgatttcaaacaaaaacttgtgaccaaggaatgcaacgacgctttagatgagtattttgatgtatacaagatccttgacatgtacagtctgtacgctccaaagtgtgtccccactccacgaactcctctacttctcattca

SEQ ID NO: 27554 - DNA, 540 bp, Arabidopsis thaliana
tccattaaagataacccaatcttctccatcctctgcatctcctccatcaatccaccaccaccacaacgcttctccttccgttttatctcttcaccaatcctctcctgaatactcatagcggcgctagccaattctggtgttttggaagcggcaatggcgccacaagaacactgcttgtctgacaaggaaccgccgccactagcacccacatcaccagaaccataacactgctcattatgtaaaccggcattgccgtccggaagcttcagctccacgtggcagcaccagattggccaccatcgcctgaatctgcttcgaagcagaccaattcttgctgacgacttggccatataatcctcctccggtgacattgctacgcgttccaaacgaccaagaccgtgacgtcgtccttctttggttactgcaaccacttcctccactgtttctatctctcctctcatcagcgtttaagccaatgaggagacttgtgaaagcacgcttagctctacgaacgctctcgtacataacggccgttgctta

SEQ ID NO: 27555 - DNA, 476 bp, Arabidopsis thaliana columbia
ccctcaagcattcgaacaaaagcaatcgttgcaaaaaagactagatcggaatgccttctacccaaaagagagaactcaatgcaaactgtttatgaaatttttgaaaaaaaaaactggattcattccggttgttgcgagtaccaaccaatggagaaagattgaccttagttattgtagttatcaaggccaaggtctctcagtgcatcagttgcagcggctctgcatgtctcattgttggctttagcagttcttatcagcttctcgattccattagcaagcagaatagttctgtagtgtgcatgcagacagaacttgatattataaaagagtttgcgatatgtgcatattgttggatgacaagaattggaaacagagcaaaaacctgttctctgcacttctgacagcaatgttccgtatcatgttgcaagcgtttctctgcatttgagcagctactgggaacctcttcattgcttgga

SEQ ID NO: 27556 - DNA, 550 bp, Arabidopsis thaliana
tcaagtcgagaacttcgtgtggaaacatatcttatgtcgccacgggataccttatgagatcgtcactgataacggctcgcagtttatatcaacccgcttccaaggcttctgtgatatccctaagggaacggccaagccgaggccgcaaacaaaacgatcctcgacggattgaagaaacggctagatgctaaaaagggcttgtggtccgacgaactcgaaggtgtactttggtcgcatcggacaactcctcgccgagccacaggagaaacccttttcgctttagtctttcggacggaatgcataattccggccgagatgatagtgccaagcctacgacggagtctatcccccgagaacacccctgataacactcaaagggtcctcgacgaactcgatctgattgatgaacgaagggattcggccctggttcgtatacaaaattatcagaataaaatggctcgtcatacaattcaaatgttcggcaacgaagattccacgaaggagatcgggtcctctggaaagttttcagaacactgccgaaccgaacgct

SEQ ID NO: 27557 - DNA, 557 bp, Arabidopsis thaliana
agagcgcagtattgcaactatcctccagcatttctctatccggtaaacaccatcataccttagtagtcctccttgaggggcgtatggagaacgcttgtccttggtagacctgatcatatatggaagaaggtaatgaaatagtaataaagacgttgcatgcaatagagttgtacatgctcaaataaccactaacctgacaactcgaacaggataccctagtttacaactaagtcttaaagcttcattaaagtttagaaatacttgatcaaaagcttgaaccgtgttagtccttttgttgcctttgagaattcttcccccactatgtaacacattcaagaaaagagataaaatctatcagcaaattggagaatagcaagagattattagaataaagcaaatgaaccaaatgattgctcggagtaatgaaaagaagaccaaccttcctgtgtatagaaaccattctccatgatcctcatcatcatcataacctccagcgagcacaacagattgagctccataactcgcttgccagcaatgccggaacatgtgggaagtga

SEQ ID NO: 27558 - DNA, 1048 bp, Arabidopsis thaliana
gaatacatatagaaatgtagattcttaagtggtattttgatgctcattatgaacaatttagtaattgttgaataattttttcactgtgtgatgattgtgtctttagatttcatattgtggagttgtttttttggtttgtagctatctgaagttatggaagagagaggtatgaacaagacagtgagtgatcaagcaatccatcttgatcttgttgctaaagctcgtgaaattactgctggggagaattattttgttgatcttccggaaacatctaagacggaactcacgtatgggtctcttttgaactgttactgcaaggagttgttgacagagaaagcggaaggtttgctgaataagatgaaagagctcaacattactcctagttccatgtcttataacagcctcatgactctttacaccaagacaggtgagactgagaaagttccggcgatgattcaagaattgaaggcggagaatgtgatgccggattcgtacacttataatgtctggatgagggctttggctgctactaatgatatttctggtgttgagagagtcattgaagagatgaatagagatggtagagttgctccggattggactacgtatagcaatatggcatcgatatatgttgatgctggactgtctcagaaagctgagaaggctcttcaggaactggagatgaaaaacacgcaacgggattttacggcatatcagtttcttattactttgtatggacgtctggggaagctgactgaagtttacagaatttggcgttcgttgaggctggctattccgaaaacctcaaatgtagcttatctaaacatgatacaagtgctggtcaagttgaatgatttacctggtgcagagacattgttcaaggaatggcaagctaactgttctacttatgacatcaggattgtgaatgtgttgattggagcttatgctcaagagggtctaatccagaaagcaaatgagctcaaggagaaagctccagaagaggtggaaactcaatgctaaaacatgggagatctcatggattctatgt

SEQ ID NO: 27559 - DNA, 1048 bp, Arabidopsis thaliana
aagaggatccccctcattgaagatttgaataccaaatttgtttcaaacaatgccaagacggcactcagttaacattaactaaacatcgttagtggcataggtctagttccgattaaatctaaaaaaaattcaattgtaaccttaatttataatctctaatacgctttataatcactggatttaaagtgtagttgggaactatcattccccaaattcagaatcactcatcaatctcgtctcacacaagtacctttttcgcaaaagggaaaatatttatcactagacccaaagaaatattatacaaagttcaaacattgactgacccccatacaaatgcataatatataacaaaaccaaaccaatcgaccacattattttttagtttccttcaaagtcgaataacgataatggcttaaccgatccgttccatggcatacatttagttcatattattaggcaaccgaaactttatccgtagaaaacgagttcttgagagggtatgaagctcgcattgcgatgccacataggcctcttggattggcaatgttgcgagccatcttcatgtagccagcctccccccatgtgtcgcccctcgagtttttcacaatccagtagtcacgaccattctcggttccatacccgaccacaacaacaccatggtttaggtttgttccgcaagttccgtcaaacactcccttttagaaaaataaaataaaaataataatcagtgaaattcttttttcaactaaagaacgttttctaacgaaaatctaaagaatgaatttttttaccgattcataaagctgaaactctcggctgctggaatcgacaacggcagtcacaggctggtgagcaaccgctttcatgagagcggcttcatcgtttgcaggcaaattctcatacccatcaatcataacattcttgttgtcttcctacacaaatatttaagttcgaaagttattctcgtttttgaacccaaaaaataaaaataaaataaaaacttattctctcattttttctgttgatctagtcttatagacattattta

SEQ ID NO: 27560 - DNA, 558 bp, Arabidopsis thaliana
actattagtgaagttatttgtctcccaccttctactcgtgtacctagtggcagacggaagaaaaagaggataccttctgtttgggagcatggacggtctcagccaaaaccaaaattacacaaatgcagtaggtgtggtcagtcgggtcacaacaattcaacttgtgttgctgcaatttagatatatctttatctccaaagaattgaatattgttgggttttttaatattttcttcattgtgtcgtgtcattactctcgtttgttaaaattactatcaaacttttacaagtaattttgaaggttattccaatattttaccttttaaaatctcttgtaagatcctgtttaaaacgtctgtttaaatccttttaaaataccttgtaaatctttcgttatgccacttacatatactttaaacgattgtaaatcaagttaaacacttttacaagcttttaacttgaatcttttaaaatgtcttgtaagtcgtttactaaaattactatcaaactttacaagtaattttaatagtaatccaataattaccttttaacatatttt

SEQ ID NO: 27561 - DNA, 599 bp, Arabidopsis thaliana
gttgttgctggtagttccccaaaaattgctgtttgggaacgaaaccatggttgtaaggaacaaaaggtttgttctgaccttgttgttgctgtagaggatacacatgatcctgaggattagcaacgttggtgctgcggtaggagaggttaggatttttggttttgaagttgttgtatcctttgtagccaccctggattgttgttgttgtagcagacttcttccaactggttaccctccccatcgtgcacatgcttctgttggctaagaagaatcctatccagcttgtcattcagcgctttgatctccttcctgtgtttgtcatcaaagtcagctgtgcctctgacggtcctatcgcagtcttcgttgtaattaccatctgattgagctaggttctcaaccaattctcagccttcttcaacatcattgttctggaaattcccattgctggcggtatccagaagcattctgatgcgtggtaaacgcctctataaagagtgctgagcagagaggctttagtgaagccatgatgagggcattggttggtgtacccttgaacgctccatgcacacagaactttcacagcttctgtaaaagcagag

SEQ ID NO: 27562 - DNA, 581 bp, Arabidopsis thaliana
cgttcaattcaggcagacatgggacaaaatatattctatatatatggtagtaaatgttgatatgcctaataccctaaggtacgttgtcgtgccactagcaagttgaagaagaagttgttgttttatgatcgtgtgctatgtccaagactgtttacacatgaccccgaaaccaaaccagatgatgttgctttctcggcggctaaatccattggatatatatcctgtttgttatttcccgagtttaatctctattcaaatttgattagtgccaatgcataatgtaacctttgcttcttccatcaactatatttgtttctccaagtttcaagatgtggttctggtgttaccttgattacttgctattatgcttttagtttacctcactacgttggaagatggccgttttttccgtccttgcttccctttatgaccaaaatgtcttgaattctctggtgtgattatgactttaggtttccatatcgatcactgaagctcattgagcacatttttaaactatttggaaaatattgtaatttacctaaatatagggccaaatacataacttaaatagatggaaattg

SEQ ID NO: 27563 - DNA, 512 bp, Arabidopsis thaliana
ctgatgttcaactgaagacttagactcatcctcaaggtggatcgtatgcatgcatacatctggagatatacctgcaatgtcatcaagagaatagccaagagctttgcgatgatttcgcagcttgcttagcaataaggtgagctctgcgggattaagagaagcattcataataacatgataagtagtttagccctacaggaagtggtttcaattcgattttaggagcctttgctggatcccaatctcaattattagtcggcgttggagtcacagatggaagagcttcttcaactgtaagttgcattacatgttcggtctcatctagcagcttagtatatgtagaagtttcactgtccaaatctgcactatcctctatggaagagaccaaaactcgctctagtgggtcttctaatttcttctctgaaatactatctgaagctgatgaagtgaaagaatctatcgagaatgttttccttcttgaccaaagtgttcatatcgaactgcatagtgag

SEQ ID NO: 27564 - DNA, 581 bp, Arabidopsis thaliana columbia
gaggttgttcgactgagactgtgtgccaccgggtccatgttcggcactgcttctcggctaaaaatcttaggatcgactccaatccatctaactccaaatctcagagtttgaagaagaacgaaggagattccaactcaaagtcttcgaagaagagcgatggagattctaactccaagtcctcgaagaagagcgatggggattctaactccaagtcttcgaagaagagcgatggggattccaactccaagtcttcgaagaagagcgacggggattccaactccaagtcttcgaagaagagcgatggggattccaactccaagtcttcgaagaagagcgatggagactccaactccaagtcttcgaagaagagtgatggagactcctgctccaagtcacagaagaagagcgatggagacacaactccaagtctcagaagaagggcgatggagattcgagctccaagtctcacaagaagaacgatggagattcgagctccaagtctcacaagaagaacgatcgagattaagctctaagtctacaagaagagcgatggagattcgagctctaagtctcacaagaag

SEQ ID NO: 27565 - DNA, 598 bp, Arabidopsis thaliana
cacaatggccgaaagacaactctcatcccgatgactctgcacgaagtgtatctagaccagctaagtatgaaacaacgggccatcaaaccaaccgaaccaatcgatacaaagggcaagaacaaggtaagtaaaaatagtttactctttgttttcaaagaaacacttatttgttcaattaatcccgtaccggtgctaccgagtaagatcgagttgattttgcaagagtataaggacgtgtttctagaagacaatcccataggtttaccacccatcagtgggatcgagcatcaaatcgacttcgtttcggtagccgctctaccaaactgaccagcttatcgcatcaacccgaccgaaacaaaggaactcgagagacaagtgaatgagcttatggacaaaggtcatattcgtgaaagcatgagtctgtgtgccgttctggtcttactagtaccaaagaaagatgggattgtcgagccatcaacaatatcacggttaagtatcgccacctatcctcgattagatgatcgcttgataaattgcaggtctagcactttcaaaaattgatcttaaagtggttacatcaacccggatgaaggaggtg

SEQ ID NO: 27566 - DNA, 550 bp, Arabidopsis thaliana columbia
aaactttctttggatgtttcagatatctgaggagaaacagaggttaaggaccggcacaaagtccatagtgcctgcagcttttgtatctttcaagagccgttggggagcagcggtttgtgctcaaactcaacagacaagaaacccaacagaatggctaactgagtgggctgcagagcacgtgacatctactatgacaatctggcattgcatatgtagaccttaagataaggaggctcatagtcggcgtcgcatacttcttcctcaccttcttcttcatgataccaatagcatttgtacagtcactcgccaacatcgaaggcatagagaaggcttttcctttcttgaagccccttatagaagtgtatgtctctgtctatctcaacatgttctgtcccgctgcctagtagataaagtctcttaccatttttggtctttgtgaacaggaaattgttaaagtcgatcatccaaggtttccttcccggaatcgccttgaagatctcctccttttcctccaagaatactcatgcagatgccaaatttgaaggttttg

SEQ ID NO: 27567 - DNA, 585 bp, Arabidopsis thaliana
agctagttgttgttgctggtgtgtgaacctaggtggtggaagttgctgctgatagttgccctgatactgcggcttaggaacatacccctgaccttggttgtatgaacaaagggcttgggttgattttgctgctgtgaagggtagacttggtcatgcgggtttgcaacatttgtactcctgtaagacagatttggatggctctgcttgaagttgttgaaacctttgttgtaacctccttggttctgcacatagctgacctccttggttctgcacttggactgtctcatcatcacccagaaaatgaatgtgcttttgttgcacaaggagtagcttgtccagtttgtcattcatggctttcatttccctgcggtgcttctcatcagaatcagagctggtgcggatgcttctgtcataatcttcattatagttgccatccgactgagctaagttctctaccagctctcatccttcttcaacgtctttgttgaggaagtcccgttggaagcggtacaagaagcattctgatcttgggaaggaccctctatagagagtgctgagaagtgaagctttggagaaccatgatga

SEQ ID NO: 27568 - DNA, 534 bp, Arabidopsis thaliana columbia
tattttaaaccggccactaaccgataacaccactcgcctaaaccctcgcgtgtgaacctaatggtcatacgttttcaagaacacggtaacacggacgtgagacaaaagtgcgagagagcctctgtggtcactttggtctctctgacagctacgggtccacctttctcttttacccaaatatccccactcgcttcttttacttgcgcgtgaactttcaaaaccaaccaatgctaaatttccgaaactacccttcactctgtttttttgttttcttcgttctcttaagattagttttctcatcacaaataataataaactcttttcttttgtttcatctctttcttcttctctgcgtctttgaggcaagaaaaaaagagaagatgaaagcacccaacatggagacgataacggagtctctagagaaatcgatgatgaattgttctctgaatgatcggagaagaagggtcgtcggagatgggtttgggagatcgtcgagcaacgaacacatgactccgatctcagatagaacattgg

SEQ ID NO: 27569 - DNA, 457 bp, Arabidopsis thaliana columbia
ccctcgaccactatcacatacattaggctgtgaagcttcagccgtacaagatgattaaattggaggacacaaatagcaattctaaaactaaaaaaaaaaacttcaaaatttggtaaaatctgcaagaaagttgagttgacagtttggaagaagagaagcaaaagaaataagaactacaaacacctaaattagtaaatacccctacttactaatctctaagacattgaatgatatccttaaacaaacatcggagccagagcattctaggaatgctgctagcaaatggacacgaagctcctgattaatcaatcagagcctctatgtcttaacatggtctcatgaaataaaagacacagagatctcctcaacagaacttccagtggttgtcacagttaacacatgtaacataagtcgtcattggctcatcagcacttcttgtttgcatctgatagtaggt

SEQ ID NO: 27570 - DNA, 496 bp, Arabidopsis thaliana
caaaactaaactcgtatccctttactatctcgtataaatccataaatgaccatacgaagtaacctctcgtgtctgatccattcctacagacggacgtagtaaaatcttttttcttagtacacgtagaagagaagaagatgataaaataagaaattttaacggatttgagcacagcaccaatataaactttaacgatcatacgttttaatatttgttgtccgctgtactcaatcatatattgcagtatttatatgatcaaaaaatccggactgaaccaaaaccgtcaataaatcaggttcgagagaaaacgcaaatagatacacaaaatttatttcttacaaattaaactcttgacgtttatcatctttcataactagtacaccagtgctacatgtgtagcaaatccagaccacaacatatatagatcaactaagttaaaaacgaaaagtaacgtgctatactagaaaataattagatgcatctcgtgaaaagagta

SEQ ID NO: 27571 - DNA, 813 bp, Arabidopsis thaliana
  unsure (1)..(813): unsure at all n locations
ggattgcatgaattcttttagccatccatatggaaaccaaacctccttgccctataggacaggacatgaagtaactctatcatctctaccccgaaaaattcgggtcagtataagacttttttcaaccttggtgatgtggtcaatttcatgaatctcaggatttcacatctgagctgcatttttccatctccagtttggaaaagctcacagtttttggttcacatttcagttggagaaagaggctgaagttaaaggcatccctgtttgccaagctttggacatagaaattccgcctcctcgtcctaaacgaaaacccaatactccttatcctcgaaagcctgggaacaacggtacatcttcctctcaagtatcatcagcaaaagatgcaaaacttgtttcatcggcctcttcttcacagttgaatcaggcgttcttggatttggaaaaaatgccgttctctgaggtttattcctgatctttctcttcttcattttatcattttggtggtcttgtgatagacttcttatgttttattttctggttagaaaacatcaactggaaaagaaaatcaagatgagaattgctcgggtgtttctactgtgaacaagtatcccttaccaacgaaagtaagtctaagaaagctacaaaattgtagtcgaagaatctgatgaatgctttcaagtgcatgacaaattatttgttccattctgatttttagcaggtaagtggcgacattgaaacaagtaagacgtcaactgtggacaacgcgggtcaagatngtcccaagaagancaagacaaagatggtacgatg

SEQ ID NO: 27572 - DNA, 585 bp, Arabidopsis thaliana
taacattgtattttatgcaggaaaagttggaggaaagacttgtgcagtataaaaacaagaacgacatgcttcttcgtgaaatggtgagagatcttcaacactgggatcatttttttagtactacagtttctcctttgtgtgatcatatgaaagttccttttatctgttcaacttggtttgtttcttaattatctccccagtatgtagattaggacctactaccggtatttagcattctagactaggacttggtcttagctaacgtgaaagaatgtcatgttgtcaggacatttcagatcgctatagatgttacattacatttcattatgcctgaagatgctgtgtagttctgacatttatagaaatttgacagtctagcacagaagcccagatgagacaattgctagatgaaagatctaccttcactcagaaagaggtatgtcttcattcattggagataagggtccatcttcttctgttataatgcattctccttgtaaaaattgcatgatttcaatcaggcgagtctagaaaagaaagttcacaacttcaacacgatgaagaatccttggtggctgaggaggt

SEQ ID NO: 27573 - DNA, 523 bp, Arabidopsis thaliana columbia
tttgacaaatagttttccttcaatcataactgtcacaattttgttacacatttacttacctttagtacaacataatattgcaaaccaaattaatcttgacgagagtgtgtaatgtaaaaaacgtactaacacaataagttatcagaatctttaacttgcaatctcaccaaagcctcttcacaaatctcaggaggaaactcttttaagaactcagtaacaatacgttcttgatctctctgcatctcttcaatctcctctctctgtttcctcaacaaagactcaagtttctctactataaccccaacttcttgattgatcggtccttgtgctgacgacaacttagaattagaccgtggcgcaaacggtgaacgtgagtctccagctccagctttaggagaggaccagaattttctccctgaaggaaatctatctaaatggagcgtctctggagaagacaaacatttttgatacgctgaatcatcaccgataagtcgagaaggggccaatcggggatgtgtgaatg

SEQ ID NO: 27574 - DNA, 606 bp, Arabidopsis thaliana
  unsure (1)..(606): unsure at all n locations
tcataatataaaaatgtaatttaacgtacattttactcattatgtttgagtttacacactccatttgtttcaatcgaaaatggcggtaaggtgatgctccaaaaccgccataaggttacgagtctggcttacttccacaactgcaacagcacagccttgaagctgtctcactgcttctacaagctgtcctcttagcctctgagacagtaaccgaccgtccgctttcatgcactctctgtacagcggcatgtacgctattgctactcttagcggtgcaggaaggtctcttaaggatatcgctgactccccttttttcaaaactctcatgaaattcatgaaatcgtcatggctttctctcattcctttctcaaaagctgactccgaccagtgttcttggagaaacgattttagatctgaaggaacggattcgtcttctgatgaccttgcgatgctgtctgccactgagtatgtagccgtggaatctcctaagaagtctgatttgagaagaaactctactccttggagagacctccgcttcttctcctgctgctttgaggattcgatgctgagagcggtaagacaggtggtggacacgagggangagat

SEQ ID NO: 27575 - DNA, 604 bp, Arabidopsis thaliana
cacatcgcttgagaaatcaactgctttgattgattctggtactaaaagtgatagagcttatcttcttcttctcagaaatatgagtagcttattttcttgctaatatatttcctcatgtttcttcaggattagtggacccttcagagcttcttacaaatattgaattgcatataaacaaaatcaaagaagaagcacatagccggaaagaaataatcgataggattgaccgctggttatctgcgtgcgaagaggaaaactggctagaagaatacaatcaggtaaattttccttgtaggcaaataggtttgttggaggatgtaactgagaaattccttccttggttttaggatgaaacccggtatagtgccggaagaggtggacatgtaaacctcaagcatgcagaacgcgcccggatcacagtaaacaagatcccatgtatgttcttgtagttccaccaaatattgttatgagatctttagcttattgttgcattgttttattgttttctgtagcaatggttgacaatctcatcaagaaaacacttctatgggaggacgaacacggaaacatttctatatgatggtgtaagttaaagtactttata

SEQ ID NO: 27576 - DNA, 528 bp, Arabidopsis thaliana
cccctgatattttttatgagacaataaaataaataaaaagagcgagtggtatgctgaaattaaaccgaattacaaataattttatatgagcgagtggtgtgctgaaacgaaatacggaactcattattaatgtcacagtgtaaaaaataatcccactattacatgggcctaaggaaagcatgccgtttttaggaaaaataaaattcgtatagactttaaaagggcaagcagttcaaacacagtaaaacagaggcctgatgtttttcgctagaacatattcgtgagaattaagtaaatgcaacattactactacgaagaagctgaagaagaaaagttgctctgcatttgcatgatgccttgagaaccaagaaaagtggtgttgcccttgagaaaagcagagtaccaatgagcagagagttttggagatctcgtacgatgaggatcactgaaattcacagagtataatccaaaactaaactcatatcccttcactaactcgtataaatccataaatgaccatatgaagta

SEQ ID NO: 27577 - DNA, 425 bp, Arabidopsis thaliana
agtgtgctctaatggtttttctgtcaagaaagctgaagatgtggtgaacatcatggtgggaagaggttatgctcttggaaaagacgccatggagaaagccaaagcatttgatgacagacacaacttgatctcaaacgcttctgcaaccattgcatcgcttgacgataagatgggtctgagcgaaaagctaagcataggaacaactgtggttaatgagaagttgagagatatcgatgagcgatatcaggtgagggagataacgaaatctgctttagcagctgctgaagagacagcaatcagtgcaagaacggctttaatggcaaacccttatgtatcaagtggagcttcgtggtttcaaacgcgtttgcgcagtgacaaaggcggttaaagagacagttgagaatggaggagaaggaagaaaggag

SEQ ID NO: 27578 - DNA, 701 bp, Arabidopsis thaliana
tcttcttcagtcgcaagggttgaatgagagaagacatttgggtactctgcacggaaagcatccatactctcgcttccatagatttcaccagcaactatatatacagtcgtggaggacggatatcccatggcttttagaaatatagctgcttctcgcggagacattggacatccgccttgaatccgtctctctcggctatcaatctctttctccttccaatgtttgacactgtacctcatgattctcagctcttctgcttcctcagttgtaagattgtggttgcatcctgtaaaggcaagcatgtccttctcatatctgcaaatccaaaatccatttgatacggaaccaagatccaaactatttcccttgttgatgataaaagatatgtcggatttacctcaaatgcagagcgatatacggctcagtgttgtttcttaaccggttaaccaaaatcttccctaggtcctcaatctcctttgtgtatagcagtgcctggtaattagcacgacatctcagtcgttggatagatggtggcaggccattgttagcaagccgtgagtccgtaagcgtgaactttaacaccttgtgacgtttcaacaatggcaacatttcgcttctgtagtaactagcctgtatatcagttgtgaatttaagaatttacttctcattgtgacatagcttatgggagtcaagggagagtc

SEQ ID NO: 27579 - DNA, 557 bp, Arabidopsis thaliana columbia
tcgaatcattggagaccctcctttcacatggtttaatcgtggatcgcatgcatggatccattggtattcacccgggacaatcagcacgtgggctcggcagacgaacatggggacagctctttactcccagatgcaatcttgggggactcaactagcaaacataccgagtgtaaaaatggaactgttgaatctttctaaaggtaggagaagtagtatatggcttttccgatatcagcaaataaattgggaggacactaatatagtaatatgtttgatctttaaatgtttatttggttttgaatgattttctcttcttcttgccatgatatgttacatggttgctctcttatgagtttctttctttctgtaaagcttttgatcacccgatatatatggcttcttatattttgtttctattgctcttagatttcatgtttgcaaacggactgtgatgttgcaaacgaaattttcatacatattttagaaatttatacttcgcaataacatttgtatcatttacctcatacaccatcatcgttttgataacacacatgatt

SEQ ID NO: 27580 - DNA, 438 bp, Arabidopsis thaliana
tagacatcagcagtttcaatcccttcaaatattcacagaacactgttacagagaaggggcatacagaatatagataatccactgctctctcagggttgttatatgctgcacgaatagcgagtaaccgtttctttgtcccaactgcctcctcccatttccattatttgttgaaccatttgctcaatactactgccactaactaaagttgaagcagcttgaccataggtgtcactttgtgccctgcaatggtgtggagatcatagagaatatagaacttgattactgaaaaacaaaaattcccaataaagcctcttgttcaagaataacatttacgttggttgttcttgaacgggagtagaatttgaagccggcacagccatagactgggttgtcgacggagctgcaactcggttgattgatagaaacttgtgttaaatg

SEQ ID NO: 27581 - DNA, 590 bp, Arabidopsis thaliana columbia
gaatggtccagcgaccttgtgatcgagtgcgatcgagtggatgtcatgagggtgtgatcgagtggtttcgatggggtgattcctccggcttcgcgattgagtgaaactgagctgtttgcttctccggggttgcgatagagtgatttgccctagcagggctccgaggctgcgatagagtacttttgctgaaggcgtcattgggcattctgattttcctctgtttgaactccaaaagcatccaaagtacctgaaaacaaccaaatatgccatgcacatgcaatcctaatgcaaaatcgtccaaagtatgtaaaacacactaaaacgactcctaatgagatgaaacgtggatgaaacaatgacaaagtggtgaagaatgaatgcctaaatcatgaaaattatagacatatcagatatccacaagaaatggtcaagccgaagccgcaaacaagacaatactaagcaatctaaaaaagcgcttgaatcatctgaagggaggatggtacgaagagcttcaacctctcttatgggcttactgacaactcctaggcgttctacagggaaattccgttttctttagtgtatgggatgga

SEQ ID NO: 27582 - DNA, 480 bp, Arabidopsis thaliana
tcactcgtctcccgccgaaagcctacgcggcgttaagaagctcgttcaaggcgaagatgtcaaagtatccgaccacgtcgggcgtctcgatcttggacacgtgtttcgatctcagcgggtttaagacggtgactatcccgaaagtggcgttctctttcagcggtggcgccgtcgtggagcttggttcgaaagggatattttacgtgtttaagatatctcaggtttgtctggcgtttgcagggaatagcgatgacagtaacgctgccatctttggaaacgttcagcagcaaacgctagaagttgtgtatgatggtgcgggtgggcgggtcgggtttgctccaaacgggtgtagttaagttagttaatgaaaaacagaacggggtaaattttaaatttatggatttggcacaaattagctttatccttaatcaagtgtgtaatttgggtaaagatcggaattcgtgatggtctttgaagtaa

SEQ ID NO: 27583 - DNA, 1028 bp, Arabidopsis thaliana
ggaaaacatcgctcagtgaaatgataccttcaacacgtttgctccctgcttccactatcaccagcctccttacacctgttgtgttttatatacacaaacccaaaccccagttacatcgcatctgatgttcctgtgtcaagcaacaaagctggaggattgtatataggagatattgtgtagctggattcgccaaccgctccatcactttcacaagagagtctgagcgcaacgacatgtgacatctctgcccgttgaagattccataaggcgggctcgcatcttgccccaactgtagcgcctgaaaacccacaaacacattatcctccactttattataacgtttcatctcttctttcattcttgtaaagatgtatgttcaaataaatcagaaacgaggcaatttccatgatagataggcaggttacatttaagtaaaactcgtaatttgatgagacatgtgatggatcttggtttctgatgagaggtttacctggtgaactgtcatgtcatcaagatgaatctgtgcgtatgccttgtctttagccagagcagttatatcactggccaattacaaatatcatcagaacacatggacgtcaaagatggaatgcatatgacatcatgtcgattgatggatagaggtttaccttcgagagtatatgtcaataagcgagtcgttgtcatccactacgggaattgaactgacttcagctgtaataaccaggaaacataaattaagcatgactcattcattcatttccatctatgaggaaccagggaaaagatcacgagaaattctataaatatatctgctttaagattgacaaaactgtttctatgttgataaacctcgttagtttactcatgtagcagcaattacatctgtataaaaataataaaagtggtcgtaacatctaaagttggtttgttggtctgcattgacttgagtataccctatgtgttcagctacttgattatattaccatctagacaaaatatttaaaactgaaactttgtagtaagactga

SEQ ID NO: 27584 - DNA, 628 bp, Arabidopsis thaliana columbia
  unsure (1)..(628): unsure at all n locations
ctcgaacttgtcccgtgccattcagccgacgccatacgcctcccagaagaccgacatgcacctcctgttgccctccctgactcctccaaccgtaggatgccccagcccaattcttaatactatttagactcgtttcgtctctagttagtactgtgttgtgctcagctcccactctattagttaatgtttgtttgggacaccaagtccttccaaccatgagtgctagtaggctggccattttggtttttgtttagattcggtttggttcagttttaataaatctctggctgaactctaaccgaagttatttcgcttttggtttggttttactttggttcggtttccatttggttaggtttgttttagtttgttccaaaaaaaccgtgaacaaaaattctgatgtttttttctcaaactgttgcttaaatagccaacgtgaaaaaacatgactagttccagggaaataagagaagagaagtgatcagctgagcaactaaacgtaaacagaggacgtgaaattcggcaaatgttatatccatttcttcaaattcagtaccacttttggcatcagaaaaccagaagacaaaccagaatagttcagggaagaagagactanacaagacaagac

SEQ ID NO: 27585 - DNA, 653 bp, Arabidopsis thaliana
  unsure (1)..(653): unsure at all n locations
gagaatcttgcttgtagcaacatcactaagaacacagacttcgagaggaagaagattgttggagctgtttcaggcaatcagatggcagaggtgaatgctaagctagatttggttcataacttgcttacaaggaagaagcatgtccactttgcagctgaagatgagactattgagcctgagactgagtctgaagagggagtcttctacatcgatggttagagctacatgaagtttggacaaccacaaggcaacttcaatggcaacaggtttacagggaaccagagttcctccaactatactcccaagccggctttctagaagacctttccttagaggacctatggtaattcagcctaccaagccccccccctccactctcatcagagacaagaataaaatctatacttgagcagattcgagagaacaaaacaaagctcgttctggagtttaatggcaagtttgatgctgtctaaacaaatcttaatgggaagatcgacaatctgagctctcacttgaagaagctggatgtacaggtagctcaactgcacaatcaatcaagagacaagagggctttcttcctggtaatcctgatgctanacaaggaagagctgtaatccatcttgatcacagaggggatgatgtgtgggaagaat

SEQ ID NO: 27586 - DNA, 1074 bp, Arabidopsis thaliana
tctcgtatatctctatatgcacacagaggtatggtgattcaagcattgggcttgtttagacagatggtgacacagagaataaaaccagacgcattcactttggccagctcaatctcagcatgcgagaatgctggtttagttccgctagggaaacagattcacggacatgttataaggacagatgtttcagatgagtttgtgcagaactcgttgatagacatgtactctaaaagcggatctgtggattcagcaagcacagtgtttaatcaaatcaagcataggagcgttgtgacatggaactcaatgctctgcgggttttctcagaatggtaactctgtagaggcaattagcctcttcgactatatgtatcatagctatctcgagatgaatgaagttacatttttggcggttattcaagcatgctcaagcataggttcactggagaaagggaaatgggttcccacaagctcattatttccggtttaaaggatcttttcactgatacagctctaatcgacatgtatgccaaatgtggagatctcaacgcagctgaaacagtcttcagggccatgtcgagtagaagcattgtgtcatggagtagtatgatcaatgcctatggaatgcacggacggataggatccgccatatctacattcaatcaaatggtggaatccggaacgaaacctaacgaagttgtcttcatgaacgttctctctgcttgtggtcactctggttccgttgaagaaggtaagtactactttaacttgatgaaaagttttggcgtatcaccaaactcagagcatttcgcctgtttcatcgaccttttgagccgttctggtgatctcaaagaagcatatagaaccatcaaggagatgccttttctagctgatgcttcagtttggggttctctggtcaatggatgcagaatccatcagaaaatggatatcatcaaagccattaaaaacgatctttcggatattgttacagatgatacgggatactacactctcttgtccaatatatatgctgaagaaggggaatgggaagaattcaggagactgagatcagctatga

SEQ ID NO: 27587 - DNA, 598 bp, Arabidopsis thaliana
tgggtagaaccagcaaaatctagagtagttatcaatgaacactacataataactgaatccttgatttgatttaacaggtgaaggaccccagagatcacagtgtattctctctagaggtctagtagctacgaaagtagaagcagaaaagggaagtctaacacttttcccaagctggcaagattcacacaccatcttggtactcttattcccgatactgatagctttttttggagataacacatggagaacttgtgaatgaggatgccccaacctttgatgccatatatcttcactcgccccttactgtgctttccctttgtcaacaatttccttgttgccttatcatatattcgaacatcatcacagtcaaattgaaatacgcagggatagtcattggtgagcttggaaactgacaacaagggtttagaaatgtcaggacacacaagaacatcatttaaaggtaagttacctgaagtagaaggaagactgcctgatccggtgtgagttatgggaaggaaattgcgatttccaaccatcactgagtcacttccttcatacaactgtgtctgtgtgagcttgtgaggagcattggtgatgt

SEQ ID NO: 27588 - DNA, 616 bp, Arabidopsis thaliana columbia
ggagatgttgtacacggaagagcttctctaggtttaaatgtcggaacctggtgtcccgctcctcttaccgtcacaaacattaaaccgtcatactccaccgtccaccctccgacctaacggcaagtgaaagaaaaatatatatatatatatatatatctttacagtcaatcacacacttacttggaagaaaagttaaagtttgtaacttggaaccaaattaacctgtagtttggtgtaccaaggtgtccagtcttggactatcttaagacctagcttctttagtgagtatctggttgcggtcacggggactcacccgtctgtatccccactattaagtttaccaaacaatttaaaacggttatcgctcgttttcagttaattcttacataaaaatgccaaggattaggtgttatacctgaaaacccatacgcgtaatcccgctgaaacaagtgttcttaaggttggaagcatagaagcgggacgtcagaccagaatgagacagtgtcactgcacatagtaaaccatgcatatggtttaagttcctatctatcaatcatttccacacacgcttttggttaactatgatagtaagagtataatatgtggtgcatgtgca

SEQ ID NO: 27589 - DNA, 566 bp, Arabidopsis thaliana
actgtttgttgggcaaatgtagaaatgtaaatgtggacgtacactaaaacgtgtactgtaacccaatggagaaattgtttcttcgccaggtacactaagaccagtgtacgtacacgtttctaagagacgactgaattcccctgtatctccgccaagtacactaacacccgtgtacgtacacgtttcaaataaacgactgaattcccctagatattgagcagtctgttgagtgagactgacgtcttcctcaagatttccttgtacatattcttctactattacatcgtgtgtggtaggatacagggtacttcccccaatagatccatccacaccaagataatcatctacacccatcatcatctttgttgccctcctcaacttcatcctcttctgttgtatcgtcttcaacatcggcttgctcctctacatcttcattattttcatcaacatttgtagcactatcagacacacggtcactttcagaaacttcaccatgagacctagagacagtatcccgaacgccttcacggtattattgaaagagacgaacaagttgagagacagat

SEQ ID NO: 27590 - DNA, 506 bp, Arabidopsis thaliana
ctagattcggagatggagtttggcattactggttcaaagcttactaagcctatcagttgcattgcttctagcataggcacacctcctcagactgatcagaatcccaccatagagcaacacacaacgctccaacacgttcagctcgccaatgagagttgtagagcaacggtgactacccctgtcgatcgacaccctcgggattcacggacagagaattttgcagattctcttcagcccacaccacttgaggacctattgataagttctcttctctctcttctcctgttttatctttgattaattctttggattattcgaagactgcttcacatgataacaagcctagattcctcgaaagcttgtttctcctgttgtttttgcaggtgacgagaagagtgtcgatcgacacacccactgagtgtcgatcgacacaccccgtgagtgtcgatcgacaccagaagctgctcgaaccatatccgtttacacacagccttggaaggcgagga

SEQ ID NO: 27591 - DNA, 522 bp, Arabidopsis thaliana columbia
ggttatggtaaacataaaacaaacctgctggaaaaagttacgagcctcatcttcttgtaatctgcctttctcaacaatataatcaaagagctctccagacttgacatactccatcacaacataaatgtcactcgtggtctctattacctcatactgccgaataatatgaagatgcatagacagaccgtagaatcattaatctcactcgtcactgtaaagaagaaatatacatgcattaagataaaaatacatactaaaacctactaagcagaaacatttgattatcagagcttttgttctagaaaccactaaagctaaaagtaacggtgcttgtatatacctttctcttccatctccatgttcttgatcttacgacgattaaggattttgatagcaaccttatgccctgtgacaacatgctctgctattttcaacttcccaaaagacccaattccaagagtcttaccaagcttgcgattcggtaaaatcgattccactccattattgccaaatctatttgat

SEQ ID NO: 27592 - DNA, 466 bp, Arabidopsis thaliana columbia
gctcctttagcggttaagcacgattctacggggacgacaccgcgagggcgtgacacacgcgtgacgtcggagtctttgaaccagaagagtttcccttgtttgagcacgaaccatcggcgtcgccaagtcttgatgtactctccttgtttcgtgagccagccggttcgttctgggtttgaccagaactctacgcctccgtagtcttcggaattgttgttctgaccgccgattactgctcgccacaggcttgccatcttccgaagattgaactggagaattagggttttgatccaaatctgccgatgctatcgaaaatctgtttatcgattccattattttttcgtgtttatcttttgccccaaaatgtttttatgtttcattttcttcccttaaaatatttataattacataacaaccccttcattttgccaattgcattacagtcagcaacaatgttttaatattg

SEQ ID NO: 27593 - DNA, 489 bp, Arabidopsis thaliana columbia
aatttctcatagagaaattacgaatatatctaaggttctcgatcatctaaagtttttagggttcgacttgctcctcctcgtctctgcttacctatatttgaaatctttatcacaaactcagctagctattacatcactaatggccgaacgttgtcaaagaattgatgaagaggttgttgcttctagagacgagatcagttcgttgcccgacgatttgcttatccagattttgttgcttgtaccgatcaaagatgcagttgggacaatgatattgtcaaaacgatggcgttatgtctggacgttgttgcctaaactcgagtacagtgatcctggtgatgaatgcgaaacggtgtggaagtttcttgaaaagttattggaacttcacaaggcaccttttctagaaactttgtgcatccaactcggtaaaaattttctattgaggtagatgttgggaaattagttgcaaatgcagttgatcgctttgtgcgc

SEQ ID NO: 27594 - DNA, 394 bp, Arabidopsis thaliana columbia
catctgtgcttctcttcacaatctaggtcatcaagtctactacttgtcttactttcttcacgggttttctacagatactccatattgctttaaaatacgtctcaaagactcgcttctgcaacattagagaaactatttctatgaaacatttgccaaacttatccaaaaattgaaactttgattattcttatgcatttggtacggttctattacacaacttatcatgtcacaaaagagaaaactgctaatgaaactgtaacaaacgttttcaaagcaacaaccactaaatgaaaaaataaatcaccagaaccacacaaatcttatcataactagctcaaatcgactacacagttcagtgtacattactcactaatgagtgatgaagtttaaccca

SEQ ID NO: 27595 - DNA, 552 bp, Arabidopsis thaliana columbia
tgaaaacaataatccgactcttttgcaaacagaaatgatgatgctgttttactcactacaattgaagatcttgtattagaaaatccggtagaaagcttaaacctaataatccttgattacgatgtcggggattctgaactagaagacgaattccgatgtaatttatcgtcctcggacgaagatgaagtagaatatgaagaataataaatgtgtgaagtatatgtttaattatttgataaaacatttgaataaattatgctttataatatatcattgaacatttaatttgttcatgaatattaaatatgtaaaattatttcaatttcaaaagtataaggtgactattatgctactacttggcgactaaattataatttggtgggctccaaataacgaagcccaaaaccgatagagatgtaacaataatacgactactcaacgactaccctttgctttgttgggtttctaaatatcgaagcccaaacccaataaaaacagtgacgcttatgcgattaattagcgactacagcttaatttgttgggctaccatat

SEQ ID NO: 27596 - DNA, 529 bp, Arabidopsis thaliana columbia
ccaagaatgaaaaacaaatcatctcgggtagaagagttagtagtcatttgtttagtcaaggatttatgcctgattattatgttgtataagcatggagaagaaatgaatatggatatcggaactagttacacggataggacgtattttagtgagaatcatgaagaagtgggtaatgttgtagaagatccatatgtggatatggtgaacgatgcatttaattttaacgtggggtatgatgataacgtggggtatgatgataactatcatcatgatggtagttatcagaatgtggaagaaccggtccgtaaccattcaaataagttctacgacttgttagaagatgcaaataatccattgtacgatggttgttgtgaagggcagtcgcgactcatgcacaacaaagcggagtataatatgattgacaagttggtggactccgtttgcgaaatgtttacagattttttaccagaaggaaaccaggctaccacttcacattaccagaccgagaagttgatgcgcaatttaggac

SEQ ID NO: 27597 - DNA, 524 bp, Arabidopsis thaliana
taacgcttgcatcctctgtatcattatgtaatctggtcttcggttctgctcatatacaaatagattgaaacaatcaacaacacaaagaaactcaagaaaaccttgttgctaacaattatgaataagctgttacctggaagtcaaggtagtaagcatgctgttcatgtagcaaaagaaaacaaaaattatcaataaaatttgtaagaaagaaaataggttttaagacaaacaagctataaaagtgtttatttacctcccagacatcaatggtaagcaatggctgcaagaaaattaaccaagattaaaagttaaggatttgcattaactctacggtgatatttaatcaagtaaattgtgtattcaagttccttaatgaaaaacttacgaaagagccgagcacaaggggattcacagcattgggagttttcactactttgagtttgtcatttgaatctgaaagcattgagataagagtaaggaagaagttaatatatttatcgtaagctcttaaacatttgaaacac

SEQ ID NO: 27598 - DNA, 697 bp, Arabidopsis thaliana
atctacattaaggcatctattggcaaagaacgatgcaaaaccaaggcttttgagatggattttgtttctacaagaatttaacttggaaattaaagacaaaaaaagggattgagaatggtgttatggatcatttctcagttgaggattgacaatgatataccaatcgatgactctcttcccgaggagcaactattggcaattcggcttttggatgcaagtcatgagacctatatgaaacttgaggaagtcaagagattgaaagaaaattgtccatggtatgcggattatgctaactatttggcatgtggaaaagaaccgccgaatttgactagttatgaaaggaagaagctcttgaaagatataaaccgcttctattgggatgaaccatttctttacaccttatgtaaagataagatctatagaagatgtgtcagacgtgtctcgaaagaagaagaagaaggaattttgctccattgccacggttcaagctatggaggtcactttgcaactttcaagacggtctccaaggttctacaagcgggtttatggtggcaacgatgtttaaagacgcacaagagttcatttcgaagtacgattcatgtcaaagaaaaggaaacattagtaggcggaatgagatgcccaaaatcctattttagaggttgagatatttgatgtatggggaatagatttcatggga

SEQ ID NO: 27599 - DNA, 614 bp, Arabidopsis thaliana
  unsure (1)..(614): unsure at all n locations
actctangatatcaagttcgtcagctgtaaccaagtaatgtttctcatactnagtatcgtcaagttcttgagcgaaaatggcggtcctttcactgttaacatctacccttacatcagtctttacaccaaccccgatttcccagttgattacgccttctttgacggcaatgcacagcccctgaacgatggtgggacttttcatcacaacatgtttcacgcaaatcacgacaccctagtccacgcgttggagaagaatgggtttggtaacatgcctatcattattggggaaattggttggcctactgatggggacagtaatgcgaatctggactacgctaagaagttcaaccaaggctttatggctcacatctcaggggggaaagggactccgaggagacctggccctatcgatgcatacctgttcagcttgatagacgaggacgccaagagtgttcagccaggatactttgagcgacactgggggatattccatttgacggcttccaaaatatgccttgaacctagggacaacgaacacaggagctctgactcaggcaaaggggtangtacctagagaggaagtggtgtgtgatgcagcaaatgtgaggttggat

SEQ ID NO: 27600 - DNA, 477 bp, Arabidopsis thaliana columbia
aatgcttgaaccaccggctggtgccttgtcaggtgtctgagatttaactgccgtcggaaattctaacgccacagtgtttgaaaagagaattttgaagagagagaaaataaaaacaactaaaaaatcatacctttatcagtatcagtctccgccgcacgcacaacaaatctccgccctacgagagatccacaacaagatcagtaaaaaaaaaatcgaagaaaacattcatcaatctatccaacagaatgctaactaccgggtgattcgtagatcaacgtcgagaaaccagaacgccggcgagtgaactcaacggaatccgaattccggagagagaggactccgactcgatcgacggaggtaactctggaagagtggatggtggagacagtgttgagaatcgaagtcatagaaccgacggaagagagaatcgtctctggtggtagttaaccggagactggagtggtgtgagtctgtgag

SEQ ID NO: 27601 - DNA, 547 bp, Arabidopsis thaliana
cgcacctactcaaaactgggaacttcttacatccagctgcattgtgacctgcttcaccacatgatttgcaatgcattactacgcccttctttcctacttttaatctctgtggacccttcttctttggtgactcatttggacccttgatccgatgatagttcttcttctcacctttctttctcccaggtggaacaggatcttgaagtggtgcagttattaatcctaaaccagtaggccaatacatttgccctctaactggatccggcccggtatcatactgttctcgccaagcgatagtgtaaaacattggaataacaaaatcttcaacatccttacccacatcattgatggccgcataggcatgttcacacggaatccctgtgacttgccatttgcagcaagagcaatcccactcctcagttttcaagctcacagcattagaattccatcaaaccaaacctcaaatttctcatgcgttcctttggtcacttcacatttaacagcagagttccactcctctttcagaatctctgagacatactcagat

SEQ ID NO: 27602 - DNA, 527 bp, Arabidopsis thaliana columbia
aataaacaagcattaataatggaataatattaggacaatgataagatatataactaaagactataaaatttaatatcgaatacttagtacttactatcccaatcaacaagagaatcagtcgtccaactcggactcttaggatcagggctaatttcttttgcaaacactgaagtatagtaattcattcctacgtaatctgtagaaccctttagcaacttcttctcagcttctgtgaattttggcaatctatgaccgacacgatccttcatcgattgtggataatctccataagttgttggagccaaatgcctgattaaaaaaaaaaaaaaaaagaacttataaacagttagagttataatatatcacatttttcattattgtaattattttaccatcctaggatgaaatcaagcacacgttcaatggaacctccaacatgctcaaggtcttgtggttcgaaccaagctggactgtgtgcaattccaattttacctcagcacactgtaaaatgtttaacaaaataaatg

SEQ ID NO: 27603 - DNA, 628 bp, Arabidopsis thaliana
ccagtggccgagaagaatgcgcgtataataccttgaatctagcaggtaagctttgcacaagtttgactaagatgcaaagaccaatatgggttggcaagtgacaatgaggaagagttggagtgaatgtaattctgtaaaaagatagcacaacttaatagattggagtaaagagaaaaagctattaatcacaacatttgttttgtctttttacctaacgtaactcttgtgatcatcaacttcaactgattcttcagtaagaacattgagatcttccaaagaaagttcaggatgctctggatctttgatatctcttatacgatttgtagactgttaagggaaacaaaaaaaagaagatgatccaataacaatataaacataactacgagaaagtcattgtcttagtaatgaataacaaaaattaaggatatcaaaaatctcgagctgatcaattggttctactgaaaactcatcggtactgctctgatcagtacgataacgccgtgttctcttcggataaataattgggttcttattggttaatacagaatccatgttttctctcctgaacgcataaccctaacgatcaattagtagaaaactgaagaacttatcgaatgagacgtgggag

SEQ ID NO: 27604 - DNA, 620 bp, Arabidopsis thaliana
accagattgaattttcaagtcatacaatcacactcattgcaaggaaagacaagaaactgtaaataagcaagcacacatatcattcaagatctcaaacttatggcatcaacaaaagcagtgaacaggttgcataaaccagtcaaaagagtaatatagagagatcaaaaactcccaaaacaaccattcttaaacatcctaaacgactttagcaatcacattatagtcaccaaaaaggagcattaggtagattttaatagaaaacaaaagaggtttatgaacattactcttcttctttgcatctttttgttaagcaaccgaagtacattccctcgcaaagtgaccttccttgccgcagatgaagcacttgttactgccaccgccacctccgctgcttccacttcctctccgatcacagtcacgagccaaatggccagttcctccacattcgtaacaagcacgaccaccaccaccaccaccagaaggtatcttgctggtgcaaactttcgcaatgtggccaactccgccacaggtataacaagtgcttccaccacctccaacgtttccaccgccgttttgcctacaatccctagcgaaatgtccacaccaccacacatgtagca

SEQ ID NO: 27605 - DNA, 411 bp, Arabidopsis thaliana
tagccaagtgccgcttcggggtaagatccggagagttcctcgggtatctagtcacgcaccgcgcatcgaggcaaatccgaagcaaatcgaggcattgttgggaatgtcatcacctcagaacaagcgagaagtgcagcgcctaaccggaagagttgcggcccttaaccgtttcaactctcgctcaaccgacaaatgcttggccttttacgatgtgcttcggggaaacaagaagttcgaatggacgacccggtgcgaagaagcttttcaggaactcaagaagtatctggcaacaccacccatcctcgcacaacccgtaatcggagaaccactatacttgtatgttgccgtatcggatactgcagtcagcggagtgttagtccgagaagacagagatgaacagaaaccgatttt

SEQ ID NO: 27606 - DNA, 551 bp, Arabidopsis thaliana
  unsure (1)..(551): unsure at all n locations
nnnnnnnnnnnnnnnnnnnnnnctaaagacaacattcgtgccatcagtattgttgaccgttaccttgaacatgaccgggtttatatttttgaaaatggcggcgataaaaaggtctacctttcttccgccgactggatgacgcgcaatattgattatcgtattgaagtggcgacgccgctgctcgatccgcgcctgaagcagcgggtactggacatcatcgacatattgttcagcgatacggtcaaagcacgttatatcgataaagaactcagtaatcgctacgttccccgcggcaatcgcccgaaagtacgggcgcagttggcgatttatgactacatcaaatcactcggagcttccttcatgttcagcttaagaacccggatcctcgtcgtggtctcctgaacataatctgcaccatatatgctcctctcctccacttgggtccagcgtaacggtgtccagcatgagctctcgtacaatgcttcaaaaggagccatccaaactcgcctgatagctattgttataagcaaactctaccagactcaagtgat

SEQ ID NO: 27607 - DNA, 592 bp, Arabidopsis thaliana
taaactaaattgcatgtaccatacgtaacccgtaattgtaaatttgatcaactctataaatggagacaaaaacacacacaatgatcaaaaccttaacattctaagccatgaagaaccaaagcagcttctccattgttgctcttcttctcattttcttttcctcatctgtctttgctcagctgcagacaaatttttaccggaagtcatgtcctaacgtggaaactattgtccgcaatgccgtccgccaaaagttccagcagacttttgttacggctccggccaccctccgccttttcttccatgattgcttcgtccgtgtaagttttttttaaatcgatatattagtttacattttgtaaacgataatgggtagaaaaagcatattgtacgtgtttttaatgtaaatataaatattaaataagtaaataaaaaacataaatatgaatatatttgtattaaataaagtgttattggtaatttcatttgcaaaaaaaaataattaaatagattttattactttttgtctatggattctataatgattttgtagtctatgaattttgaatgttgttacaataaagattttaaattt

SEQ ID NO: 27608 - DNA, 1427 bp, Arabidopsis thaliana
agggaaatgtggtgagaggagcttcatgatctctgtgattccgactttgtctttgccatcgaaaatcgtcttcaacttatcatcgcagtgaatctccttcttgttcgccggattctacaatgaggcaagaaatgaatcactcaaacagaaactatgaataatccagaaaacagagaagtttatggtctacattagctgcttgttgtttacattgaacaaccaattcaacatatagacatcatctgtgtgtattacattaaatagactaattccaaaactcaaagaacactacaattccaagttctctaagataatgaccaacacaacaatccaagtaatcttcacaaccaaacccacaagatgcttcatgtatatagtcaaaaccaaacaatccattctcaaccacaagataacatgcattttactcaagatccatgttctacataacaatcaaatcatccgccactaaaatgcttaatcgatttagtttacatgcaacaattccttctctaaagcaaccaaatccctaagttcataaacagatctacgcaaagtaaaaaccttagaaagctccaaaatcaaacaaacctggagattgtgaagcttcacatactcccaaactttcttcagagcggaaccacgagtgagttccctttctccggcgaagctagctagctgctgtgacaccggacgagtcttgaatatcccttttccttctccggctacagtaacggcctcaacagtcgccgccttcgacatcagtgtcctgaaccctcccaaaaccctagaaattcccgccattttttatttccgaaaagagaaacaaacaacgactagagaagaagctaaaaccctaacaacagtcaaatagagaaaaattcggcgagagagacaagaaagactcttaaaagaagatcgctaaactcattttgggcctttcataaactatgggcctatttgggcttcataaaaaacgaaatatttaggatgttttatcgaaattaaaggtaaatgtaagagctaatgtgcaatttaagaagatagctaaaattcagtttgggcctatttgggcttcagaaaaaagagaaataattaggatgtttatcgaaaataaaggtaaaatgtaagggttaatatgcaatttaaaatgaacttttagtcttcggtgacaaacggcaccgtttaatagtttgatgccggtcgctattcgtacatggcggatgctccgtcgcaacatcgccgtagagagtcttcttcgccgctgcgtcaccgtcaacttggatgagacatattcttaaaaggagaacgatgtggtgagtggaaaccctaatcgatatcagtggttgttaaatgtattagttgattttagttgtcttagtctactagagatttttagttcttgtctctgagtggtgaatgacaagggt

SEQ ID NO: 27609 - DNA, 551 bp, Arabidopsis thaliana
gccagtgtgctctaaagctgcgatgtgtgttgaaccactcagaaaatttctcaaaaatcgcatcgatcatcggtaacagatggtacttccttacttctgaaaacacagcgttcattgactctgcggagttgctagtatctatgttgtacgtgtctccctggaaatagcacctagcccatttctcaatcccagttgcccgatccagataggtggctacattaggatgctttctcctaaattctgcatacctaatgttgaactcagtcgcattataaatatgagctaatttcctaaatttggccatacctgcttctttgtcacctgccagcattttcttaatgttttgagacaaatgccatacacaatgtccatgtgatgccttcgggaacaaatccgcgactcccttgatgatgcttccatgtctgtcgcttatgaaaaccaatttcgggtcatccggtataatggaattcaactttctgaaaaaccagttccaactagcatgattctcgctatcaattacaccaaacgcaatggggtaatgatgatgatta

SEQ ID NO: 27610 - DNA, 505 bp, Arabidopsis thaliana
aaatggaattaggttggttctgccttagaagtttaaacacgtaaaacagcttggttgtacttagcattgtagtgtcttagaagtttaaagacatagagatccttatgtgtgggctggttgctcttgttgtaggtttgacgatgactctacagttgcagcaacagtccgcagcatatttgaaagagatttcaaagaacctcatgccaattggtcacagacatcaaaggctacaatcgatcgatggtatgaaacatttgcggtaagttctgtgcttttttttttttatgtttatgcttgttttgttgtttggtttcatttctgatgtgtgctttgtctgttttgtagcaagtatataactgggaccgttcaattaacaaaagagtaagggttgagtttgaagcaaagctaaactctaggatgtctgatcaagtgtcacggtggaagggaaattggaaggagaagggtgatgaagcgagctaaaatggattgatcctgaggtgtggaa

SEQ ID NO: 27611 - DNA, 570 bp, Arabidopsis thaliana
ctgctgtgtgaaccacggtggtggaagttgctgttgatagcttccctgatactgctgcttaggaacataccctggaccttggttgtatggaacaaagggcttgggttgattctgcttctgtgaagggtagacattggtacttctataagacaggttcggatggttgtgcttgaagttgttgaaacccttattgtaacctccttggttctacacatagctcacttcttctgattgcagagtctccccatcctggacttggaacgtctcatcatcacccagaaaatgaacgtgcttctattgcacaaggagtaacttgtctagcttgtcattcatagctttcatttccctgcgatgcttctcatcagaatcagagctggtgcggatgcttctatcgtaatcttcattgtagttaccatccgattgagccaagttctctaccagctctcatctttcttcaatgtctttgttgaggaagttctcgttggaagcggtatcaagaagcatcctgatcttgggaaggaccctatgtatagagtgccgggaagtgaagcttttttaaacccgtgatga

SEQ ID NO: 27612 - DNA, 512 bp, Arabidopsis thaliana
attcttcaagctatggaaacgcagatccatgaaacgcctctcttcctttcctccattaagtggcgccgcccaccgatcatcaaacaaaacaaaagtgcagatccaaacatgaatggcatggtccttcacgatatctacgatttccaatcatctctccaaaacttctcaatatctgacatcgaaattgcaactgacaatttcagtccaggtatcgagtttatcttcataacaatatactctcttcttttttacttgaaggactgtttggttgctactattactgcaattaaaacgacgcttctatgcagaaaacattatcggtagaggcggttaccgaatcgtataccagggaattctaccggaaggaaagctaatcgctgtgaaactgtttgacaaaaggcacaccggacgagcaaacagctgagtttctatcggaacttgggattattgctcatgttgatcatcctaacactgccaaattcatcggttgttgcatcgagggtggaatgcat

SEQ ID NO: 27613 - DNA, 613 bp, Arabidopsis thaliana
gtcaatgcgtttattgaatcatctttgtggtttcaggaaatgagcactagcgaataaacacaagagaaccatttctataggaggggtgataacacctatactaatggcttgtgcagtgccacttccgttgactccctttgccccaagatggatcgacattcctacctaaaatgggctttgttcattgaagatcagcgtcatgaagggatgcacattctcaagtttcagcatagaacgaaaatggatgccagacttctcatacctagccaagagctcacaaccatcacagtgaggtgtaacatcgatttcaaccctcctaatgaggcacttttcttcatggatggggcaccccgacaagagaagctccgaacaatgaagaaagggctgagaatgaagaaagggctgggaattaagaagtggaggagatggattgggagaactacaatgcgagtaggttccattttgaggaacacaaaccaccaccaagagtgagtaagagtctgagtgaagcgcataagaatattggttcgatgactgcttggaataagtttcaagacaagatgttggaaaattgtggcaaggccatcaacgtaattcaggctgtactgagctg

SEQ ID NO: 27614 - DNA, 489 bp, Arabidopsis thaliana columbia
tgaacggagagattcagctctggtgcaaatacagaattaccagaatgaaacggctcggtactacaattcgaatgtccagcaacagaaattccatgaaggagatcggtttctccgcaaagtatttcaaaatactgacgagccaaacgctggaaagctaggggtaaactggaaaggaccgtgtagtgacccgcataaggacatcgggcacgaccaaaggattgaatgaaaaaagttttgcccgattgcaatgccgattgaccgcgtgtgcccaaacggtgccaaaacatcaaagggcaggaatgggcatgaatggttaagaatgggcataaatgggcaaatatgggcatgccgcggtgaagattgccccgccggccgtggaaccgacatgagtaggacacctcactcgcggtgccttgtggctcaagttaccaaccttagagccgaagtcagctgagcattggagccgaagttggtgggacggtggagtga

SEQ ID NO: 27615 - DNA, 589 bp, Arabidopsis thaliana
  unsure (1)..(589): unsure at all n locations
taattcttcttcttcttcttcttcttcattatcatcaacatgaaatttttctttgttttactattgtaagaaatcatgatctttctgatgtgaatcccttatgaagtagtgtagtgtcatcgttgctattacaagcttaatccacataatcaaagcttagctctatgctcatttatacagatgttaaaatcaaacatatgataaatagggctaatcattcgtcctaaagttcattagaaaccaatccattgaatcaaaatcaaaactatcacaaaaacagagaacacaaaaactaaaaaagaaaactgattcactttaacaaatttgaagactttctgcaaagcaacacaaataaggatagatttatgaatcaatgagaagacaagctccatgaatacttatagattcaacggaagaaaaaaacccaccgaagttgagagtagctacacaaactaagagaacacaaacaaaaatttccaaaatattcaatagctgtgaataacgaaattaccttgcttttctacctggattgggtgatcnccttctttacttcttctctacgagtctccccaaatctatgtactatgac

SEQ ID NO: 27616 - DNA, 740 bp, Arabidopsis thaliana
tgacttggctcggtctggtaataagcaagcctcgttctttgatgcatttacaatctcaccaacagcctagcagaagcaccaacaaaggttatgatgtttcttagacaaaaaaaagccaatgattttaaaagacttcaatagaaaaaaatgaaagattgaattaccttcaagaagggtatagttagatttggatgctgttgtctaccaacaatttcaagttcctgggaaaccaatcgcatctgtagatcccccaaaatggaaaaagaaagttcttaacacactgaatatgatgaatcggagtgtgatgaagatccaacagaggcaattttccatgaaaaaaaaaaaggttcactacaaatggccttaccggttcctccaacaaaggtaatatatcatgggcaaccccgatataagaaagcatagcagctagaacatttgggacatgaggattaagatccaggtggcgcacgtggcgacaaatagagtcaataacataatccgcatttgcaacaaccagatgcccaacctgccaaacaaacaaacaaaagacaacaagatgttgattttaaaaacgattttatgatgtgattgaatattttcgactacattattcttcattctcactgtgggatggcctgaggtggcagcaagaagacgtaggacagtgtctgaagcatttctaacttggaaactcgagcaggtaagactctcaagcagaaggtaaagcgaagagtgaagaa

SEQ ID NO: 27617 - DNA, 708 bp, Arabidopsis thaliana
cttgataacacataaacatacaccttcaaaactcaatgccatttctctggttaagaaagtctataaatatttgtcccccgtcgagatattcgctgcactttgttgtgaatgctgctacttgatttaatcgtctttatctgtttgacagctttaaatgatgcactaaaggaggaagtccagcatcttaaggtattgacggggcaaggtccatcaaatggtacatcaatgaactacggttcttttggatcaaaccagcaattctatcccaataatcagtcgatgcacactatcttagccgcacaacagttacagcagctccagatccagtcacagaaacagcaacaacaacaacagcaacaccagcaacaacaacagcagcagcagcagcaatttcactttcaacagcagcaactgtaccagcttcagcagcagcaacggcttcaacaacaggaacaacaaagcggggcttcagagctaagaagacccatgccttctcctggtcagaaagagagtgtgacatcgcctgatcgtgaaactcccttgacaaaagactgagtctagactgtgctaatgtccaatttagtaagttactcttggaaaatcttctttttcatcgcaggctcatggatttgggatttactgcattatagagttaaaaacaagacagcttagaagttgcggatttagaagttgttagtgaagcttttg

SEQ ID NO: 27618 - DNA, 533 bp, Arabidopsis thaliana
  unsure (1)..(533): unsure at all n locations
gccagtgtgattgtgctctaaagccctcaggcagctccagcagcagatatttagcccgccgctgcacgctaagcactggttggtcgcttaaacggtagatctcttctgaaaccggccagcgcaacgtncgcgttgcgcaccactgcatgaagaatggttgcaccaacgagatgcggttctatgccgcggcggctggtttcaacttcgggtaattcaggcatagcatctccaggaatgaacagatgcagtcaatatgggggcaagcagataacaaaaaaccccgccggagcgaggttttttgttacatcaaagcgagaattatttgattttcgcttctttgtagatcacgtgctggcgaacaactggatcgaattttttcagttccagtttttccggcttcgtacggttgttcttcgtagtggtatagaagtgaccagtaccagcagaagaaaccagcttgattttctcacgaatacctttagccatgatttattcctctaagtacttagtacttttcgcacggcacgcagttc

SEQ ID NO: 27619 - DNA, 1054 bp, Arabidopsis thaliana
aaatgcatcaaagaacgaggcttgcttattaccagaccaagccaagtcatatagtgaccatgttaagaccaaagcaactgatgcgattacatcaagacaagagagagtttcaaattctgacaaaatagttgaagacgaagaagaatgggaaaacatactgcttgaactgaatcgttctaaacgatacagacgcacagttggttcgatcgcctcttcttgtttaatagcggccacgctctccttgcatcatcaaatcaagtctcatgcttagtttccctcgaaataattgaggtattattcctgtcggatttcttgagctctctctaggacattttcgcaagcgaaataaatcagtatatccaattatgcaggaaggagtagtggcgctggctaaagtcgaggaagcttatcgagctgagacagaaaccaaagaaacaattgaagaagtcattgaatttgcttcattctatcagcttaaagactacatgaatgctagcgacgatggagcagatgaaaaccggcttttacccgctatcaacaaaatctggccattctgtgttgcttgcatacgaaacagaaatcccgtggtacaatctctttctccctcttccgaatttatctctagattaatggattataaaacctgctgcattttccacaggctgtacggagatgcttagtcgtgataacccgaatcattcaaacatccggaggagatttcttctcacgtcgtttccgcaatgatggcccagacttttggaagcttttaacaacgtctccattccacattatgacgcctaagatcctccgggaagacaacaaatcggttctccgacttccttacagaaccatttccgagtcatcatcttctacgattgctgaagtttccagcttgaaagtgcaggcagcagttctcgatatgatcgccgagatttccagaggtaaacgcagtgcttcagcgttagatgcagtcttgaaaaaagttgcaggattggtcgtggggattgcgtacagcagtgtaactggcctaagagaagcggctttgaatgcgttg

SEQ ID NO: 27620 - DNA, 565 bp, Arabidopsis thaliana
  unsure (1)..(565): unsure at all n locations
nnnnnnnnnnnnnnnnnnnnnnnctaaagacatgttgcagcagaaagtggaaaaagaaggggcggatcagccgtcaattctgccgtaatcaagttcccgttgatgttgaaaatcccggtcagaagatcgggattttttttgatgtatggagattgcgaaaatccccgcatcttgggaaactgcgcgtaaccctacatttcatccaggtaacttttcatggctatcatcccaaaaaactatgcgcggttagaaagcggctatcgcgaaaaagcattaaaaatctatccgtgggtctgcggtcgctgttcccgcgagtttgtttattccaacctgcgtgaacttaccgttcaccacattgatcacgaccataccaataacccggaagatggcagtaactgggaattgttgtgtctctattgccacgatcatgagcattcgaaatataccgaagcggatcagtatggtacgaccgttatcgcaggggaagatgcgcagaaagatgtcggtgaagcgaagtacacccattcgctgacctgaaagcgatgatgaacaagaagaagtgatt

SEQ ID NO: 27621 - DNA, 535 bp, Arabidopsis thaliana
  unsure (1)..(535): unsure at all n locations
tnnnnnnnnnnnnnnnnnnnnnnnctaaagctgctcaatcatcagcccctgacgctgttcgctatccagaagctcggtcatctggcgtgaatcgagcttgggtaacatcaaaaccaacatcaacaccagcgccacgtcagccagaagatggcgaagatgcgcgcggttaagctgcctatcatgaagcagaaaccatcagatagccgcgaccacgcaaggttttaaaccacgggtgaccatctttacgatccggcagtttacgacgcaggttggaaatgtgcatatcaatagcgcggtcgaaaggcgtcaggcgtttgcccaacacttcctggcttaaatgttcacgggaaaccacctgacccagatgctgtgccagcaaatagagcagggtaaactcagtaccggttaactccagcgtttgcccgtcgaagctggcttcctgacggcctggattcagcactaaggcatcaacttccagtgtcggtgaaccgttgtcgttgttttgctgttgctcgctccagtgcgaacggcgcag

SEQ ID NO: 27622 - DNA, 536 bp, Arabidopsis thaliana
tggtgcaagtcaaagtatcaggaattatctatagccaagtttttctcatcacctagatgcaaccacgtagatcatacttcatacaagaacgaaagtaacaaaggaataccatcgagagtacagcataagtgttaatgacttgcctgatctataatgaactcaaacagaggtcgaaggtggtggctgatcaaatgcttctctttgacaagatggtacgctaagtcacatgcttgaaaactagaatatacaaaagcaaccacgttcacagacaggcaaaacctgtcacagatatcagaagatgacacatagataaatcagtttagtctcaaaatcaaaaatcaaatcatactaaactgacttcaaatgtttgaccaaaacaacaaaatggaaactgcaaatgaattcttacgatccaacaaatcaaaatcaatgtcaaaaggaacaaactttacttcttttaaggacttcaccaagttcaaccaaaacatagacttggaccacgcaagtgttaaagacaattcacatgtactaaaact

SEQ ID NO: 27623 - DNA, 596 bp, Arabidopsis thaliana
  unsure (1)..(596): unsure at all n locations
nnnnnnnnnnnnnnnnnnnnnnctgaagcaactcggtgctcgccaacgtaggtgtgcggccccaactccagcgcgaggcataagcctttttgcgtgagataactttccgccgctagtcgcgaaaccaccgccatgtcatacacgccattaagcagacactccacgcgaatatccgcgccacgcatgtgcgcatagtaaaaaggaatgccatcaaactgggctttcaatccgctcgccaggccttcgtacaaacgggtatagggcaagggcattgcacataccacgttgttgatatccacatgagtcagcaatgctttgttatccatctcgaccagataactgccattgcgcccacggcgttcaatccgtatcgctccgcttgattccagcgttttcaacgcggcctgcgtcaggccaacggatgaacggcattcatttgccagctcatctatggttttcaatcgattaccgcacttttcacccaacaaataacgggccagcgtctgtgatgacgaccgcttcttttttgataaacgtcgacgcataataaattttcagtagattgaatatttatatcttcaggaatttgaagataa

SEQ ID NO: 27624 - DNA, 578 bp, Arabidopsis thaliana
ggaattgtttttggtgatattggttgggtattcggcgtgggcatctttgttcgagttggctttcgagaaagctgccgaagagcgttattgaccattgatctcgtcgttgacttcttcttcgccgttgatatcatcctcaccttttttgtttcctacttggataatactacttacctcaatgtcaccgaccacaagctcatcgccaaacggtaacaaatcaatttgtttttatatgttaaaaaaaataacataagtaaaatgaataagttagaattgaattatatatgttgtgcattattataggtacttgaagagcgtggcttttgtgatggacgtagcatcaacgttacccattcaattcatttataaaactattaccggagatgtcggacgaggccaagctttcggcttccttaatttactccgcctctgcgtctccgtcgtgtagccgaactctttaaaaggttttttctttactactttctatataatatgcaatattgaaatcccttatcatatagtacatatgtgtgtgtctatttacacttcctttctttctttttttaacagctagagaa

SEQ ID NO: 27625 - DNA, 562 bp, Arabidopsis thaliana
cccgatagaaaagccttcttgcaatcatcctaggttgtgattgagtcatggggcagattcttctcccagatgtgtgctttgtcgcccaaggagaatgggaacaaacggagcttgaatccgtctacactgacaccattgatctttgttaggttgcagagcctatcgaattcatcaaggtggtcgagtggatcctccattggcagaccatggaatttgttcccctgaatcatcgacatgagaccactcttaatctcgaagttgttgttctggatagcaggaggtgcaattcccttcttctgacggtgatcacgtggtgcatctcaagcaacaatcaagatgtgatcagaagtcactaagtcaagccaagcaataacaggttttggtgcgttctaacagtcctaagtgaacatgcagaaaacagattatcaagcagaaacaaataaacactcgaccaacacaactcgttgcagagcactgggtgtggtcgagtgacaggtcgagtaacagaaaaataatgtaacagggatactcgactgcacagtctgttgcaaacaactggggt

SEQ ID NO: 27626 - DNA, 1007 bp, Arabidopsis thaliana columbia
atcaacaacattacatcttcataatcctgattactgaaaaacatgttctttttgcagatcgaagcagctgttctgtacccaggacacgccctactgtcttaaggattcgtttaaggtacttcaatccctcaaaatatgtggatagagaagacttctttttagtaatagcatttagaaccttggtctggcattgggaagaaggcctgttacttatcttttaaagtaccgtgtctagtacattcatctaagacttatctgatccggtgaatgtgatggggttgaaatttttagtagctgatagtcattttgatcttcttggtgtggatatgttttcgggtgtggttaggttaagaggaacagctattggagcgaataacaggatggatttgctgtcacttgtgacaagtggtgtgaacgatgaggaaataagcagcacagaagaagacattcttgggttagttgaaggttgggaagacgatgaaactcacaacccggatatacctgccgtctcacacaagaggggtatgactgcattcgtcttcgttcctttcgaagaggtaagtaaactataaattattgtatactcttcccacctataatcttagttacattgatttgatctgaatatcttccttgatgttattaggttgacgaatcggttctgaacttgccaccggagaaaatggattactatgtcactggctaaagagacacatcgaagtttctgtacaaaaatgtatcatagaataatgttttcacgttatatttattgttacgacaaacattagtgtttgtttgttgctgtcgaattgtgaaaaacatacattttgggatttttgtttgtttacagagattacttgaaacaagctttactattgtaagataatgttttcaagtttttattatacaccaaaaggctttaaagcaggacttgatcagatgctagacttgaggttcttggaatcatcctctgagtgaacagacgctgcacgttgggttcgatgaag

SEQ ID NO: 27627 - DNA, 708 bp, Arabidopsis thaliana
ttggccattattttcaggtttaagttatttcttattcttataaataaattcatcaaacattttatgcttttctttatgaaaaaaaaaagattttgctctaagctttatattgattccatcagaaaattaaattagtattgttaacttaatcaatgaaactactaatatatgttttactgtttgataattatgcaaaaaaattatactttgattcttatcttgagaatattttttgacttttcccaaaccgtgggaacaagattaatagaatcatacgacacagttagtatgtttcatggaacatgataccactaattaaataattaacttatacacacactgaaagaatatactgggtgagatcatcacttccacttacttaagatgtcattataagtctatatggaatctatagaacattactatttgttcatgcacatgtaaatttaatacagtaattaacgattttgggtttttaatataaatttcaggttagaaagcgtgaactttaagaaggtacgaagcatagccaaagttgtaggaacggtgatcacagtctccggagcacttctcatgactctctacaagggtccaatagttgactttatccgattcggcggtggaggaggaggaggtagtgatggtgcaggaggatccacggtggtgcaggagcggcacgatcggacaaacactggattccgggaacac

SEQ ID NO: 27628 - DNA, 538 bp, Arabidopsis thaliana
tggaggctacctttggaggacgaacgaagccagtaaccatcgccatagatgagacaatgggggttttcctagctatgcgttttgagttggaagacttgagtttgtttgtctctaagctaacggtagatggtgttccggttgatgatggaatgagtcagacatcgagttacgggttggcagctaaggggaaatcaccattgtattgcaatgaggaaagatctcctaactacgagtccgccatttggagaaagctaatagatgatgaagcggtcctccgatggatgcgttcgacaggtacagatggtgcaaacatcggtggctcttcctccaacgcacatgcaccacctatgggaactactgttgagccagctttgactttggaaacaactcaaagtatggacacggcgagtgaaaaggcagatgaggtattcatttagtagttcaatattttttataattaccaagaatgtaccaagcttatatcaaatctatttacgcagaaaggagattcaaatcttgtggaggcagatttgctggc

SEQ ID NO: 27629 - DNA, 584 bp, Arabidopsis thaliana columbia
agttttttgaaattgtaaactcttgttgatgaaatcaggaggtttaggaggaggagatgagtacctttgccgtttacgaggtagatgaaggagtagaggtgatgtgggtgacgtggcaacatgtcctcaaatttcagcagtgatctgaacttgcaaagcagcttcattatacaattctggtttagcctgtttgggatgtcgatcgacacaggtgatggtgtcgatcaacaccatctctacagattgattctcagcaacgaatctgaaattggcctcatgtggacgcttgctgttactgagtacctgttatgacacaaccattatctttgtcttgtcatcttgcttctctggagcatcatctcgtatcatatcactttgaagagagggtgacaacttctctatatcaactggaggcaactgaagtagaatctcatccatgatacccatgcaatgcatctcaggaatctccttcttggactgtcgaggtagtagacaaggaacttgtggtgtgtagacttgtatagtaacaggtggagatcaaggcatatggggcagttaagcttgtgcgataccactaggtgagt

SEQ ID NO: 27630 - DNA, 577 bp, Arabidopsis thaliana
tgttgccgctttgaccttcggcgctgaagaaggttacctggtaaacgttcgttgtttcgaggaaatgacgacgttgaaagctgtcaggtcgcccggctattgggttgtgaacaaccgcccaaagcataactttcttcccggtcccaaagtcagtaacttcaagaactgggaagaatattacttctacgtcagggtcgacctcgagtcgtatgagcgtccgttctcggggaggaaaaggacgtggacggagtttcctggtagaccttttaaacagatagggtaaagatatgtcgatcttgactagattctcatagccttttcttttgttgcagatcggtacagacctagtccggagtttccagttgagttcgaaggggttttagaggcaatattccgagctcggcgtcgcgcgtggaaagacatcacgaggtcgcgcgtcaacagaataatggggaaggtcggaaaccttcgttagctttgctgccgggcttttgaatatgcacctcccccggcttccatcgaagagacgcagcctttggacggagaggcggctgcactaaatcctcccgttagtgct

SEQ ID NO: 27631 - DNA, 534 bp, Arabidopsis thaliana
cctaactattgtcgtttattgaatacaattatttaaaaggtaaattgatttagttgttttgcttgtataaaagaccaccatacctctctcctctttcctcagttcacataatctaaattctaaagagagacgaaagaaagaaaaaaaaaaactttcaaaaatgttggttaaagttttttactttttcgatcttgatgataacaacggttattggcgttagaaagaatgagatgaacagtcatgtcaaaaccttttgttggaccttaagacgatttccgcaccactctcggagatgagacgtcgtgagttattgatcatcgttttgaaaaattccgtgcggaggatcgacatggctatgattggtgtgatggaagattcaaaactacatgaggacatggagaatgatatgcttggtgtgaaggaggatacaaatctatttgaggagatgatggagtggcagaaaatagaatgatccgttcagtgaatgaaatcttaggaggagaattcctaatcttagatcttgaaacgtcacac

SEQ ID NO: 27632 - DNA, 731 bp, Arabidopsis thaliana
ctgggtcatagagattctgttgtgggttgcttctttggtgttgataaaatgactaacaaggtcaacagggctttcacgattgcaagggatggttacatttttagttggggctatactgaaaaggatgtcaaaatggatgaatcagaagatggccactctgagccaccgtcacctgttactccagatagggctgatgaggtgatggtggaaaatggtggtggtgttggtactgagcttaagaaacgaaaagagtatgacggtaaaggtcttgaatcagatgaagaaggagatgatgatgatgaagagtatatgcacagaggaaaatgggttttgttgaggaaggatgggtgtaatcaggcatcagcaaaggtgaccgcttgcgactatcatcagggacttgacatggttgtggtggggttctcaaatggtgtttttgggctttatcagatgccagatttcatctgtatccatctgctctctatttctaggcagaagctaacaacagctgtcttcaatgagcgtggtaattggctgacctttggttgcgcgaaacttgggcaactgttagtctgggattggcgaaccgaaacctatatactgaagcaacaaggacactattttgacgtcaactgtgtcacttactcaccggattcgcagctcttggcaactggtgctgatgataacaaagtcaaggtaatgaaatttcatagacttaactgttatgttctatc

SEQ ID NO: 27633 - DNA, 717 bp, Arabidopsis thaliana
gaacagacatttatgttctttgtgcttagtgatgttacattattactttgtatgaaggcaaattctatgagcagtgaattattttggctgatactttgagcagtcaactatcttaaatctgtctcagtggcttctaaatatgcatgtaacaccacattatatctgttgatgatgtagttttacttttcattaggtgtcagctgtaactgatcaaactgaagtcccagaagctggacagacgcaaaccaccggtgatttggatgatgatgatggaggtggcctggttagtacttgtcttcatctccctagcataacttccaaaagtggatatatttcatggatctatagggagaactcaagtaacctgttttacatgatgtatatagttactgcatgatgtaggatttggtatagataaaatatgaacagaagataaaccaactttaagaaaagggtgttaatagacaattttactatgtgtaagatccatggtgtagtaggagaacatggagttatctttccagtttccaacaacactgtcataatcattaaatgcatttgttctcttagccttacctggttgcttattctgcagtctctgaatgcacaatcgcgggcgcttctcatgcaaaaactcgatcgcagtggaactgcatcgaggtttccttatttcctgttactaatttctgtatttgcagtttgtattcgttcatttat

SEQ ID NO: 27634 - DNA, 531 bp, Arabidopsis thaliana
tatcatatgctttgatttgttctaaacgatactaacttaatattatgtttatcttttacttttacagagtgtgaacaaaagaacacaaccaaaatgtttcttacttgattgggctggttctgatgcaaaagttgctaagggatgtattatatcttctgatccggatgaattagtgaatgactgtcgcttaggccctaccgatgttaaattcttgattgacactgctattgaaccagaagcattcctttggagacttgcggctaatatgttcatcattgaaaaagctgttggacatatgattgcatggcctgctgctatgtgttttagcctagaagaggatctccaacaagaagacattgcatgtcaggtaaagtttattaatcagtctcattctcatatatagagtaatgatcttctattaacataatgtatttctgggattcaatgtttttgacagggaccaaataaccaatgccagctttaggatgtgctacaaatgatgatgttgttgagaaggacgttggtagcaca

SEQ ID NO: 27635 - DNA, 377 bp, Arabidopsis thaliana columbia
agattcttcaccgtaacacaatttcgattttcgtttcttcaccgtaacacaatttttcgatttttgtttttttcccagaattctaatctaaattatctaaatatcttacaatataaacactattataccccgtcgccctgactttccgtcttgtcagaccttttctgcatttcccccttctgtgcctaatccattttccctttttttcattccattctccagtgtcttattcgccgatgccctgtcatcatttaatgcatttctcgtcgatgttccgtgtgcgttcgcagtcggttcttttggattcccacgacgcggtccgtacgtacgatacgggtttagtttcgtccggggcattttggtctgtttttggcttg

SEQ ID NO: 27636 - DNA, 673 bp, Arabidopsis thaliana
caatcattcaagaggcagttatagtaccaaaagcctatagtttcaagtttaatgtaagagtaaaactgatgataccttttttccaggacgtacgagccttagagcaacatcagctgcagtatttgcggcacgataacatcagccttacgcccactaagaggcccttcttgaagaacatgtgtgtgaccaacaagggcaatgaacccatcaatatgacatcccatatcgctgcaattgagaaacgcaaaacaacatcagaaataacacaggtgaatcatacagaaacatctaaaaacaggtattacttgaagacaacttacattttaaccatgtcaccatcttccaacacagactcatcactagcaagcggtgaaaaatgaccaacagtgttgttcacagaaatgcatgtagggaacgcaacacctctctcaatcttcttcttagaattcttgtacatgcttgctgtttgcctttaatacaaaaacagaagaaagaacaaacacataaatatctaagagtaatccaaggtcgaaatctacattaagaacaaattgagatatactcactctttaataaaagagtctcctttctcacagatatcaacaatcttagcttttggtttgcattcagctaaaacaacctgtaacgcctctgcaattgaaacccaacagaa

SEQ ID NO: 27637 - DNA, 538 bp, Arabidopsis thaliana
aatactctttatgcatgaggtgcgctactttaccaagaaaggtaaaacacaggtgtgatgatcattttctgtcactatgtcaaggtgtgggaaacgcaagtggtgacttgtggtgtgatatttgtgagacgaagacagatccgagcgtacgttactatacttgtgatgagtgtgggctaagtctccatattgattgtgtacttggagatttatattatatgaagctaggacaccaaaaccctgagatggagatacatcctaacaatggtgctactcgaccttcttgcgcccgttgtggatttcgttgcaagttccccttcttcgttaggggtacaaaagaacaatctgctctttatgtttgttcaatagacttatgcccaaggtaggactagttataactattcacatttatgtttgacattctttgtctatattgtaaaacagtgtgcttttaaaagtttttcaacatttgatgttaagaattatattccaatttttattttctttcgcatgatagtatattttatgaagaaaaaaa

SEQ ID NO: 27638 - DNA, 624 bp, Arabidopsis thaliana
  unsure (1)..(624): unsure at all n locations
tatatatatatatatatatatatatatatttttttgataatgatatgatcctttctaatttaaaacactagatgggcgtatggaggaaacattagggtgtatttctggaatggagaagatcagagttaaagatacaccagaaggagttgtgtttgggaatttagactctgttttctcgaagatgttgcaccaaatgggacttgctttgcctcgtgccactacggtttacatgaattcttttgaagaattagaccctacattgactgataacctcagattgaaattcaaacgttacctgagcatcggtcctcttgcgttgttattctctacttcgcaaagagaaacaccattgcatgatccacacggctgcttggcttggatcaagaagcggtccactgcttctgtagtttacattgccttcggtagagtcatgacaccgcctcctggagagcttgtagtggtagcacaaggattggaatcgagtaaagtgccttttgtttggtcgctccaagagaagaacatggttcatttaccaaaagggtttttggatgggacaagagagcaaggaatggtggtccatgggcacacaagtggactgctanacatgagcaatgggtgtgttgt

SEQ ID NO: 27639 - DNA, 469 bp, Arabidopsis thaliana columbia
tgcagctcctgttctagtcttgtcttggtttacacttgtacaaggtaccacgataagactgaccaacaacagcttgccgtgacgtccctctccgacaagttcgtgtccttccaagagcaatgcaacggccagctcgcagggttggcggcgaaccattctaaaatcagatcagccaacaacgcgtacgcggagcagtcaattcactttctgcaggaaccacgcggactactggagctcgaacgcgactcaattttcagggcaccatcagcccgagtgtccaaaattcaaaggaagcctctgaccagcagactccgccgccctcggttgaagtcgggacgacatcgactcagaatccaaccacctcgtcttcaccagcaggatttgccgcagtttcaaatgagacaatagctcggacgctagttccacttgatcctgccatcagactaccaatctccgatcctcgacaaga

SEQ ID NO: 27640 - DNA, 473 bp, Arabidopsis thaliana
  unsure (1)..(473): unsure at all n locations
tgagtaatataatcaacgccgcagaagctctatgacaattcattttttaaaattaatatatataaaaaaagtaaataatataatagtttacaattgttactaagtaacgtcctgccaaacccgtcccgccaaacccatccacaaaaaaaatatttattttattaatgttgatcttatttataatatgtttatgaatcactgtcaaaagattttaatcgttacgggatgttgaacccacacatttttcgccaattagttaatatatgttcattcttaaaatttcgaatcataaaatatgacgaatttttttttgagattttttaaactctatatattatataatgatgttaagtttttttgatatattaaactttttataaatttagatattattaaaattttatgnattttaaatatatanatactagtattttttntattaatatgttttgccttttaggtaatgatataat

SEQ ID NO: 27641 - DNA, 562 bp, Arabidopsis thaliana
aaacactgttcaccccgcgaattgcgagtttgagaatcagagattctcgaaaactcaacttagaaccatataatagtttggaagatccgaaaggctatctcgcagcttttctaatagcctctggtcgagttgatctaaacgaagccgatgaagacgcagtatattgcaaacttttctctgaaaatctgtttgggcaagccctgatgtggttcactcagttggaaccaggatcggtcaataatttcaaagaactatcggcagtatgtttaaaacaatactcaattctaatggataagagcatttcggacaccaatctctggaatctgtctcaagggccgaatgagacacttctggctttcatcaccaaatttaaaaacgtgctatcaaagctcccaaggatctcacaacagtcggctctgtcggctttgcggaagggattatggcatgattcaaggtttaaggaagatctaatacttcacaaacctgatactattcaagacgcactatttcgagcgaataattggatggaagtcaaggatgaaaaagaaagttttgcaaaaag

SEQ ID NO: 27642 - DNA, 790 bp, Arabidopsis thaliana
cgtttcaatttctttctcaagtacgggggatgaatgttgcaaagagtccaaattctcaggaaatactcttgtatctgtgcaagaaactggaagaaaactgcttggaacctcagaagggatcagagctcccggagcacccattaaatcaataatgtattcactgcatgtgaagaacgaattaggactctgcaaaaatcactaccatcacatacaaactgagcctaatatcaggaatctagaatgcaaacaatcaaagaataccttttgtcatctagtttaatcaagttcacagccccatcatcagttccagtgtagtaactgccttttaccagcatacatgggagattaatcctatcagcaaggacctagaaaaaagaaaaggatgggagtaattagcttcaccgtacatcttctaaccgtgaccaaaaaaggaactcagcgatgaaaaaggaaataatgagtgttgccactagaatccccaaataagataaccaagaggtttaagaccaaagctagaaacaagtaagaggatttgttataaaccttgaaaagcaaagccctgtgtcgtgcaagaccaacattaactcgaccaagtggaagaatagtagtgttcaaagaatttcttagttcatagctccgaagcatccaccttctcaatgcttcatcagcattttcaacggggccacccatttgctctacaactatatttgcaattttctgagtcaaatcacttgacacctgaccaggagcaaagtctggacattccgaagccaaagcgaatactctcctc

SEQ ID NO: 27643 - DNA, 655 bp, Arabidopsis thaliana
ctagaaaataaaaataaaactatatatcattaactaagtaattccaaatgacaaaaagagagataagaataccaaccgaagctcgagcaattatacgtagtccaaccatcaacaacattatggttccctgtaataatcgtcttattgatcccatctcccataagcattaagttctttttgttgatgggaacaacaatatattcttcatagacaccttctcttgcgtagataacaaagtaaccatcctctggtctagtgttattaggtgcggctgcaatagcatcggtgatggttgtgaagttgtcggatttgaacggaccgacgatcactgctttactcacgaggatggaaccgccgctggtctcacctagctcccctaagttccggctagttttccggcaatctttgtcgttgtcgcatgttttacgtaaaccctataccagaaaaagaaaatgtgcttagtacatgattagcttgtagactcatgcctttttaaaatcaatgttcattgtagccacacatgaaatgaccgggacactcttatgcacgtgaatacagttggatccgaatggggaccaaattgatttcttttgttaaagtcaaagataggactcatttgatcattgttgagttgtctaaaatgtgcgtaggcatg

SEQ ID NO: 27644 - DNA, 533 bp, Arabidopsis thaliana
cttaaaccggtttggtttaggataaatgcctcctcggtgtggtaagactttacgaaattaaataaaaaccggcccagttctgatttcattttggtttaacttggattgagattttaaacccggtttactttaattaaaaccaaagattcttttcatatcaaaattcttgaaaattggattaagccgctgtgtcagaccgaggctcttgactcgtcacgtcatgacgtcactcagcgcattttagtcaaatccccaattttttaaaattctcaacaaaagcgcttatcaaacttctctggcaaaccaaagatcaaacctttacaagaaatttctctcttttttgtgtaacgaatgtaagcaatacatcaaggaatttgatagattgaaactttttgaagtgggtagtgaatcactactagtgatggttgaccagagaagggtactgtgtccagagaaccaaggtttagcggattatgtgttgcagaagcaagaagaggaagaacgagaaagtataagctaaaccagctaggtga

SEQ ID NO: 27645 - DNA, 480 bp, Arabidopsis thaliana columbia
tcccatttgttgagtgaatgagaatgaagagtgtcgtggattatatagaggatttttcacgactattttacgactaaacattgtagacgctcagaaattaggtgtacctacccagcaacacgaaaaacgttttccaaccgtattatacgacacttatgcgactattttacgacaaaggaaaaatagtcgtattatcgtcgccggttttacgactaatgtatgaagtcggacatgtagtcgtcaaaatatgactacttattttctccagtaatgtcgtcgtcaaatagtcgtacttggatgactatgtaccgactaaagcttgtagtcgctaaaatacgattatggaacgaccaatttgtctgttgtcgtaatgtcgtcgtccatcagtcgtaagttagtcgctcaaaaggacgactacattgttagtcgcctttcgtagtcgtcgtttgcatgtttctcctgtagtgcaagaagatgttt

SEQ ID NO: 27646 - DNA, 1035 bp, Arabidopsis thaliana
catgtttggacgatcatcaacatcttcctgaacacatagtaaagcgatatggatgcacctcgtaatatcatgtgtttgataattatctccaaatgacggatccacaaggtctaattgtgacccattgctccatagtctccaagtctattgaacattttaataatttattgttatagtcacttttaaataaagcaaaaaatgaaaatgaaagtcttaagctctatactcacatatgtaaccaagttgctaacactatcatccatttgatagagactactgttcttcatgccgcttataatctcaaatactaagacaccaaaactgtacacatctgatttcatggagaactggccgtacatagcatactcgggagccatgtaaccactgccacaatactaaaaatgttgagtccatagaagcataatacagtctatagagaggcaataaatgttaagagaaaaacttactaggttcccacaactcttctcgtattggcttctgtttggtccatcccaaaaatcctcgccattccaaaatctgcaacttttgggttcatatcagcgtccaagaggatgttgcccgctttgaggtcccggtgtataattgtgagtcgtgaatcttgatgaagataaagaattcctctagcaattcctccaatgatcttgtaccgtcttgaccagtctagctgcccttgcatcgtagggtctgcacatgcgtttttaaaatgttaaaaacaaagaatggcatgcaatttgaagaatcttaggctaagtatcgaatttaacagaccaaaaagaaagtaatcgaggcttttgtttggtacaaactcgtagacaagtatcttttcttctccttccaaacaataaccaagcagttttactaaatttctatgttggagctttgaacaacaacaacttcgtttcaaactctttttcacttgtcctgaattcttcgatagtctcttcacgcaacttgtactccactaggaatgtccctacacgagtaatttattttagataccataagtatgagatt

SEQ ID NO: 27647 - DNA, 610 bp, Arabidopsis thaliana columbia
ccacaatcaacttgtggaggatgtcgattatgttcggagcagaggttttccgaatcagagatttcatcaccaacaaggctacacaggttcctatgggaatggtccaactaggtacactcagaattctcagttctaacaaccgctacagaatagcaatagtttcagcttcacaaggaactatgatcttgcttcttacgaagccccccccctcttctacccacacctagaagcaagatagaatcattgctggaacagattttggaaggtcaactaaggatcttagagagacctatccctagacggaatgagagcagcctcactacttcttggcattctgcttcaatggaaagtgagtatgagttagtgaagattgaggagagtgacgattttgtagttgcaaaggcagggtcgaacgacaccaacccttggtgtcgatcgacaccatacccttggtgtcgatcgacaccatcgcgatatatacgagacatcgcggttgtgacgaagcaaaatcgaccaggctcgacattgatctccagaatcgcttgacacacattgatagtgtcaacgacaccacataggtgtcgatcaacaccagtacaacttgagaaag

SEQ ID NO: 27648 - DNA, 515 bp, Arabidopsis thaliana columbia
taatatgatggtatccagaaatcagcggaaaaatgtcttgcaaagaggtagatagatatgcatcgtccgatttgtcgttgccgagcttttggatattttcaaaagagaatctccttcttttgctgcaacaaattcgtgctctctatgttgaatgcctctaagtggttctctagattgtcattttggtcacatgtagggcggttgaccttaggagaatctttacttggaaatttgcaatttgcgaggtaaacggggtctgcctcgttttttcaattaccatattgatgtcttgagccgaactggttgtttggtggaatttcaacttaattcccttagcttatggtggactctctcatagtccgctttatgtgtcaaagggatatggtcgcctccaccccacagacagtgccaaaatgtggatgtcggattcacacactcaagtatttatattatttgtgggcttaaactctcaagtacaaaagtacaagacagatacgcatagctagtaaaagtat

SEQ ID NO: 27649 - DNA, 500 bp, Arabidopsis thaliana
cttcctatttattagaatctccaaaaccacttaacagaaaatttcctagtcggaatagttagtgagtcctaattaacatatgatcactccccactaattaaagtttctttttctgaatttgaagctattctagtagttctgcaggttgtaaatctaactcatgttactctttgttttgcatgtaagcttggacaatgggtgcatcaacatccagaatagatgaagataaagccttacagttatgtcgagaaagaaaaaaattcgtccaacaagcactcgatggaagatgtttgttagctgctgctcacgtttcatacgttcagtctcttaagagtaccggaactgccctcaggaaattttctgagactgaagttccagttgaatcttccttgtacacgtccactagtgcaacaccagaacaacctcttgctttaatcgagaaatctgtttctcatttgtcatactctcctccacctgcttcacatcccaccatgacacgt

SEQ ID NO: 27650 - DNA, 523 bp, Arabidopsis thaliana
tgatgagatcatgaaacagttgtatgttagactccctttcttacagttggttcttcatgttccaagctatataagttacttgaaagatatcttgtccaacaagaggagcattaaggaaggggttaagttgatttccaggagaagagtatgcttagtaggaggtgtctcagagacaacagaaggaagctcaactcactgatgtaatagagttgttagcagggaaagaaatggtcagcacttgtagtgccatccctccagctactattcccgagaaactcggtgatccaaggagttttgttttactttgctagattggaaagtctatgtttgagagatgtctttgtgatttaggagctgtagttaatttgatgcctctttctttgtcaaagcgcctaggcatcacaagtttcaaaccttcaaggatctctttgattctagcggatcgctctatgcgatttctagtgtgtttggcggagaatgtgcatgtcagagttggaaaattttacgttccgattgattttgt

SEQ ID NO: 27651 - DNA, 578 bp, Arabidopsis thaliana
tagtaaccgccgatagcgtttctcagcgtctgaggagtcgctttccactccctctctttgaggcaaagtactgtgatcacggcgcactctattgaagttttcaaagcttctaacaagagtatcacttgtgggttcatcaaactcatcatcatccgaatctctggactcttccctttcttgaaaagaaaagtcctcaccatcatcttcctcctctggagttccatcttcctccttaacagatctcgacacatgaccattcccaacatgagaagaagaaaactggttgtcaattggatgagaaagaccaaaataatcccaaggtgcttcaggtggcatggaagaagattcctcaaatggggttgattccatcttttctatagacctgcttggtgggatactggatgaggtaacagtggcaataatagatactggtggtttctcttccactttttttgaagaaaaccctttgaatttcatatgattgacctggaacggactggtactaggaggcgacggaggaggagaatacgtgtcatggtgggaatgtgaagcaggtggaggagagtatgacacatgag

SEQ ID NO: 27652 - DNA, 1043 bp, Arabidopsis thaliana
tgcagattctgttgcgacgatcccatttattaacaaaaaagctaacaattattagagaaaattaagtaactaccaaaaagagtaacattgacaaatactttcacaaactcaaaaaaagaaagatatgaaaaatgagtaataataattttaaaataataaaataccttttctgtaaaatagacaaggtcccaaagacccagctcaagtccagctctctgtattcattaagttaccttctaaacattcacaccatctctttctctaacaatggagatttttcaaaaggccaaagccgttcgtctacggagccatcacgacaagtacctagtcgccgatgaagacgaagaatctgtaactcaagaacgtaacggctcagcaggtgcagccaaatggaccgttgagataatcccaggctcaacaaatctcatccgtctcaaaagcgcttatggcaaatacttaacagcgtctaacaaaccgtttcttcttggagccaccggaaaaaaagttctacagactaaacctagtcgtcttgactcgtctttagcttgggaaccgattagagattctgctttggttaagctcaagactcgttatggtaacttccttcgtggtaacggtggtttacctccctggagaaactctgttactcatgatattcctcatagatcggccactcaagaatgggtactttggcatatagatgtcgttgagatcctccctgcaaacgcaaactccgatcaccaccaccagcacctgcagctgcagcaacctccgtcgccgcttcatcattctgattctcttgatttcacacctggatctccttccagatctgaccgtttctttagacaagaggtgatttttttttttttgttatcattttttgtgctgatgattcgttgacttgatgttttgtgtgtggtagtcaacggattcactggcggttggatcgccgccgaaatcggaagggagagtgatatactaccatgtggcggatgatgatgatgatgttgaagatgactctgttgaggtaagttcgtttactt

SEQ ID NO: 27653 - DNA, 663 bp, Arabidopsis thaliana
ccggtgatgatacattgtagatgggtcttgatgatgatgatgatgccgactcataccttccctctgactgttatggtcatccccttgatctcgacctggacccatctgacccgtacctgctccaagattgagataaaccaatcttgaatccaaattgttattgctccctccactgcttccactattgtgctcctcattcatatgagggtaaatcccggtattgttatcattgttttggttgttgctattgtttccttcttctcgagatatcaccattgcagcggattgaacaagctcgaggcaaagcctaagtttattcggttcaatgtgagtcaatccaggaactgcccccttgaacaagaaatccgaagttaatgttctaaggatatcaagaggcgtgattccaccaactgtcctcacattaggatcagcatggtggtctaacagaacagccaccatgtctggagagaccatctcagccgcgatgtgcaaaggtgttttcctgccggacccgccggataattcacatcggcagctccaagctcaagcaaagccttcacaacttctctactacagctttcaacagcgtaatgcaatgctaacgactcatcaagattgagtccttccccattaccatcagcttcactagttccacgtctgatg

SEQ ID NO: 27654 - DNA, 413 bp, Arabidopsis thaliana
gctagtgtcgaagggaactctattgataccttcgaccagcacgccgccgcttgcttaaaacagtattcggtactcatcgaacacaggacgtctgaagccgacctctagggtctcacccaacttcagaacgaatccctgcgatcttacgtcgaaccactcacaattctcacatcacagattgccaacctaaaccaggaggtagccatagccgcccttcacaacagcttgtggttctcctttagattccgtgaggcaactcacattaggcaaccggtcactttagacgatgcccttcacaaagctctccacttcgccaaagtcgaagaggaactcgctgtgctggccttaagattcaaagaatttaaaacacaaaacagctcccttgcaactaaaaaacacttcaaaaaggaaaa

SEQ ID NO: 27655 - DNA, 406 bp, Arabidopsis thaliana
cggtagattttcatggcgcttcaatatcatttgacgaaaaggaaacgcaacacctcgaaagacctcaagatgatgcactattcattatgttggacgttggtaactttgaagtatcaagaattctcgtcgataccggtgctcggttgatctaatctttttaggcactttggaaagaataggaataagcagggcagatgtagtaggacctccatctcctttagtagctttcacaagcgagttagcgatgtccctcagaacaatcaagttaccagtcttagcgggaaagatgtcgaatattgtggattttgtcgtctttgataaaccagcggcttacaacctcatcctcggaactccttggatctacagatgaaagcgggtccctctacgtatcatcaatgcctcaaat

SEQ ID NO: 27656 - DNA, 432 bp, Arabidopsis thaliana
ctctagagagatactcgagcacaatgaagaaaagaagactccagctattcactcgacctatcactcgaccatgtgggtcgagtacagttcttaacccgtccaaatacttcgtcgttttgggtattagggtttcgggatatttggctataagtagcatgtatttctcattttcaaaaggaagaagtggttaatctagttttatttccgcagcccttttgttctagactttttgtaatccggatttctctttatctattcagtattcagtttctgttcttgattttcgtttactattgttcattctgttatcatactgctgttacactgctgttatcatgtcttcaacctgtttaacgtttatgctttctgttaagaagtctgagtagtgaataggtttctaaggatgggttagagtaatgtagaattctcagt

SEQ ID NO: 27657 - DNA, 465 bp, Arabidopsis thaliana columbia
agagtatactcgacacccctaaccttgaaagttatgtaaccaagacctactctctcttccttctccgaatcatcaacacaaaaatggaccttgagggttgcaaggagttggcagctctcctctttgtatcccccacattggcagctcatgaatgttgcaagattggccaattccatcaagtattccacatcaccacaaataccaagctcttgcatcatttccttatgagggtatctagttccctcaaacttcaactccttcaaatattgatagtactcgctcggggttggttctctcttcctccttggtcggtttcttctcccaacaggggttggtgtatcatctccgatgatctcaaccgcttcttcagaaaccgcttcttcaaagggcgcctcttcatggtgttcttcttcagcttcaaccgacctctttccccgagctacttcttctctttgcatggttgag

SEQ ID NO: 27658 - DNA, 684 bp, Arabidopsis thaliana columbia
catacaattcgaagcttcacaagtccttataaccacaaaatataataattcttctcctctttttttttccttgtctttttgccaacaataatatgtgggtgtaacagtgctctttataaccctctagcgcaacaaaacataaaagtcgtcgaaataaagcaaagtgcaaaaaaaaaaaaaattatacaaagtaaaagatcagttgaaaaaaataagtaaagattacaattaaaattttaaatctaagaagaacaataatcaaaatataatttctttagaatcgttaccggtgggtgagttcgaatgattatgtttacgatacctaaagaagtaaatcaaagtaaaaaccaccagaagcgcaacgccggagacgccgcagatgatactcgccgcaagaaacacgtgcctcatcacgtgatcacgtctgatcccagctccatctcgccaccaagaatcgtcgtctccgccgtctgccgccgtggctttagggaggagctgagggtgagaaggaggaggagaagaagaatgagaatctccaaagaaggacttcatttttcccggaggtgagtgagattctgtcggtggtgagctgaattggtactgtaagcgatgattggaaggacagtaattctctggcgagtgagtttctggtgaagatgtcgaggatgttatagttaatggtag

SEQ ID NO: 27659 - DNA, 480 bp, Arabidopsis thaliana
ttcgtgctcgagagttaccttgtaaatccggtttgatccattccaagaatactggtaaaccgttttacgccattcttcataggattgatgttggtgttgttattgatttagagccagctagaactgaagatcctgcgctttctattgctggtgctgttcaatcgcagaaactcgcggttcgtgcgatttctcagttacaggctcttcctggtggagatattaagcttttgtgtgacactgtcgtggaaagtgtgagggacttgactggttatgatcgtgttatggtttataagtttcatgaagatgagcatggagaagttgtagctgagagtaaacgagatgatttagagccttatattggactgcattatcctgctactgatattcctcaagcgtcaaggttcttgtttaagcagaaccgtgtccgaatgatagtagattgcaatgccacacctgttcttgtggtccaggacgataggc

SEQ ID NO: 27660 - DNA, 522 bp, Arabidopsis thaliana
cccttttgactcattggaacaagaagttatcgattacatgtcaagtctttgtccggttaaaaccgttggaccgcttttcaaagttgctaggacagttacttctgacgtaagcggtgacatttgcaaatcaacagataaatgcctcgagtggttagactcgaggcctaaatcgtcagttgtctacatttcgttcgggacagttgcatatttgaagcaagaacagatcgaagagatcgctcacggagttttgaagtcgggtttatcgttcttgtgggtgattagacctccaccacacgatctgaaggtcgagacacatgtcttgcctcaagaacttaaagagagtagtgctaaaggtaaagggatgattgtggattggtgccacaagagcaagtcttgtctcatccttcagtggcatgcttcgtgactcattgtggatggaactcgacaatggaatctttgtcttcaggtgttccggtggtttgttgtctcaatggggagatcaagtgactgatgagtgtattg

SEQ ID NO: 27661 - DNA, 477 bp, Arabidopsis thaliana
taacaagacaagaaaaatttatttacagagatagtcatgggacttccttccaagtgagcttctttaaagtcattagctcgactcctttactcctttaatcatcaagaaggtcctggaaatgaaccgatgtcacctctgtaaggatttggtctgttaagtatttcttgagcctttgaccatttactgtaaaatctccactcttaccagctagaatgactgcaccataaggacggacctcagtgatacagaaggggccagaccatctggatttaagttttcctggaaagagtttcaagcgagagttgaatagcagcacctgatcaccaacctggaaatccttagtgatgatctgcttgtcatggaaaggcttggttctctccttgtagattttagaactctcataagcttctagacggatctcatcgaggtcactgagttggatcaatcgcttctcctcagcagtttttatgtcaaagt

SEQ ID NO: 27662 - DNA, 573 bp, Arabidopsis thaliana
caaaataaaaacaggagatggtataatacaatggtgaagtgaggcgcttacctcaatcgaagaatgaacggagttggttgtcaatggctgcctgtgattgctcccatgccattgacgagtcgccctgttctgtatcagctccagtatgtgggtactcgacctcatcagctatgtggcggccaacaccgctctgaggatactcgacctctctccttctgttgcggccagaccgcggtcgtgtaaacttcgagactgcagaagtcttctactcctgctgctagatcgagtgagcacggtcctcctctttctcccatactcacgaggctcgaatgatgaatgccttgtaggaacatgcgggacctcttgctcactaggctcaggcctgcgccgacttggctcaggctcgtcatatctcctcgacggtaagtcctgagggatctgtcctacggaatagcagtagtggaagaggagcagcttagcttgtccttcagaaacttgatagcgttgaagcacttaatgagtaatttatcttgtttcttgaccacttttgcacttgctgttgtttctgtgaga

SEQ ID NO: 27663 - DNA, 430 bp, Arabidopsis thaliana
atcacgaagaacgcaagagcaacttatcaacgggtgattaatgagatgttcaacgaacatctcggaaaaacaatggaagtctacatcaatgatatgctggttaaatcattaaaaaaggaagatcatgtaaaacatctggaagaatgttttgcgattcttaaccaatatcaaatgaagttgaatccggcgaagtgtacgtttggagtcccatccggggaatttctcggctacattgtcacgaaaagaggaattgaggcaaacccaaatcaaatcaacgcttttctcaacatgccatctccaaagaatttcaaggaagtacaacgattaaccggtcagattgcagcattgaatagttttatttcgagatcgaccgataaatcattacggttttatcaaatcttaaagggtaacaaggaatttgtttgggatg

SEQ ID NO: 27664 - DNA, 640 bp, Arabidopsis thaliana
aggaaacataacttttattgctttgattttaacttgaagaaaacttcaaaacaactacacaaataaaagaggagtgaggtatttatagctttcaaactaccaaatatctcaaatattttaatcctagaaagttatctagattattcttataaaattatctagattttctatgtttaaggaggtggaagatgattctagaaaatctctacattttgttaaggaagtggaaatattgatatttgtagagaaaactttagaatttagatttggtccatcaaattattggataattgatccaattaattaaaaatcattcaaaatcaagtttaactttcaacatgtcctcttaaattttattttattacaacaaccaaactcctcatcttgatagtcttctcgttcaagaggcttagtgaaaatatgggctacttgatcatgtctcttcacatactccaatttcttgcacatctttcttgttaacacactctctaatgtaataataacatgtgtcaatgtgcttactttgatcatggaaggtggggttctttgccaaagttattggtcacttcttctccacatagatttttgttggttcacttgtggcaacgttacatggcacacacatgaagtggatagagta

SEQ ID NO: 27665 - DNA, 851 bp, Arabidopsis thaliana
tttttaatttggagtttttcaatgagaaaccatagatggagatgatctaataatcatctaaattgttggttgactttttgaatttcggacaacttgtactactaatacttggcttttcaaactgtcatactattttgtcttagtataagtaaattttagaaattagcacaagtaaacacgattacaagttgtaatatactgtatcatcacaaaacatgaaggctattaatatgagagtagagaacataattataaaaacaatcttcaaaatctattcaattaagaaaacaaaagaacttgagtttcagtacaacacaacatttgtttcttaacagagacagagcaaaaacagaagtcagagagtcgatctacgagtcggcgatggtgacctcaacctcaacaccaggttcaatggtgatggatgtgatttgcttgaccacatcaggagagctgaagagatcaatcactcgcttgtgcaccctaagttcaaatctgtcccatgtattggttcctggttacaacaccaatagttataagtgtctcagccaatgtgaagaagatacttgaagtaatgagcataatcacatgttctaagatctaaatccgcgacactttaggaacggttcccaaaactcaatctctagtgtttttgaagacataaaagatgagagaaccagaagtataccttcaccacagggagcttttcgggtagtgatcttgagaaccttagtgggcattcgcactggtcccttgactctaagtctcttgtccttagctccacgaaccagatcagtgcacactacatataccatttgcagcaacagagcaaaaacatttgttcagtattcaat

SEQ ID NO: 27666 - DNA, 413 bp, Arabidopsis thaliana
ccctatttgattaaatcgtcccaaatttgaaagtttcttgatttttttgacatttttcccatttatatacctcatatttttcattttcacattggttaaagttttcctcttcctcttcttcaaggttttcttcttctccttctttttcctcttcctcttcttcacagttttcttcttccaatttttttcccacttcctcttttttagggttttcttccatcgcttgaggctgcattggttccttatcatcaatttccttaaaattcattcacaaaaataaaattaatatttcgcttaactacttgtactagttatttcagcccaacattatcaacttttctcagaattcaattttctaatgctaaccaatgtatgtttgatcacgttaacgtatatcaatgcaccaatcacac

SEQ ID NO: 27667 - DNA, 586 bp, Arabidopsis thaliana
ccaaagttgatatttcagcttcatcacccttgaagataatccctctatgactcttctttgccatttaaatttttttctcatttcataccagtcatcttctgtaggatcttcagtctgagatagcctttctgttgctctcttcttgtggtcaaaagttctcttcagcttgctaagttgagaagtataattgacttttggtgaggtttcagcttatgtttcttcatcaacatccatatcttgaattccaaaactctgatctcctgttgttgatttctttaaagcttctctgatgtcgaacttcatcttgatgcctttttcaaggttcagattaatttttccattcttgacatctatgactgctccagctgaagctaagaatggtctgcctaggatcaggggatccttgccttcttcatctacgtccaataccacaaagtctgtaggtatctcaacattttcaatcttgacaagcagattttctattagaccatgaggatgtgcacagaaccgtcagctaagagtaaggcaaagttgcagaacttgaattccatgatcgctagccttttagctgtagagagaggaataa

SEQ ID NO: 27668 - DNA, 607 bp, Arabidopsis thaliana columbia
aattgtctccacattattagcttcttgttgattctgttttctatcgggacatactgatgcataatgttctagtttatcgcaccgataacagatcacgttactcttttctttcttctccttggtttgttcttgatcggtttgataattgcttcttcctctacctcgtcctctggtttcctcttcctcctcgtcctctgtatctacttccatctgcgttacatacatgagattctcttgtgtattgccttgactatttgatatgtcttggtttttactgatttctaacatagtttcataatgtttttagagtctttctagtctttttcgtatgctttgagtcatttcaggtacacttacacatctggaaactttggagcacaataaggaattttggaagcttttcagcaacgaagatcttgaaggacgttttttagaagctggtgtcgatcgacactacaccagtgtcgatcgcactcttattgctgccaagggaattttcgttttctccaagtctttgagaagcctgaagtctccttattgcaaagtagccctgcacgtttttagcacgaatatactaattgtatggcattgttaacctaagttttgt

SEQ ID NO: 27669 - DNA, 567 bp, Arabidopsis thaliana
ccctttcttgaatcatactgtcctcagtattgggagtctgatgacatggtggagactcatcttcttgttgaatggttatagcattagcagtagcatagtccttaggattctgaactgccttttctggaagttgttgaggatgtttcggagcagaggtggatgcaaactaactctccacatacttgaacttggaatttagagcttcaaacttgacatttagatcactataagaacaatctatcttgttgtgtaattcagttatcttcttttcaaaagccatagctccagtagcttgtccttgaatgatctgttgaataagttgcttaattcaggatcttgtgctgctggggcttgttgtggttgttgagtgaacctggtggtggattctgctgttggtacctccattgaactactatttagggacataaccttggttgtactgaacaaatggcttagactgattctgttgtggtggatacacttgatcttgggggttactacattagtgctctcagtttgacattcccccttcttgcatttggaaatgctctcatcagtgatatagtg

SEQ ID NO: 27670 - DNA, 981 bp, Arabidopsis thaliana
tcaagagctgaaaccgctccacgaagatctccggcattgagatgacggagaatcaaacggtcggcgacgttgatccgatttgaaacggacggttgagatttaatcggaagtttggcgggagatggaaacgaaaagcttatcatcgccattgttctccaatctaaacgatccgttactgttaattatcaatatcacacaaaatttacattatagtcccttaagtttgtggaaattatcaataagacacaaaactattaatttatcaaattacatacatagttcataaaccctaatttatagatatcacaaaacccagacttggaatcagtttctctttacttccctctttctctgagctatggagattactgtaatcgcttcttcctcaatcgatgaaggaattggaagttgggatctcaaaaccgggacagagcagcttcaattcaagccgtgtgcttctccggcgcatggtctcaccgccgtcggcgaaaaatttctcgcctcctctcagctctcggcgagaaatacttctggctcgattttttactggtcttggactaaggtctcattctcaaacttgaaatcactgtttttttgttctctttggatagaaagtttgaaacttgttttgaattgtagcctcaagctgaagtgaagagctacccagtggaaccaataaaggctcttgcagcaaacaatgaaggaacttacttagttggtggtggaatctctggagatatttacctttgggaggttgcgactgggaagttgcttaagaagtggcatggtcattatcgttcagtaacatgtttggtgttctctggagatgattctttgttggtttctggatctcaagatgggtctattagagtttggtctcttataaggttaaaactttgtgtattacatgcttgtttttttgcaaggcattgtcttttattctgattctttgctctttgtggttagttaggctatttgatg

SEQ ID NO: 27671 - DNA, 964 bp, Arabidopsis thaliana
gaaacacactttaatattagaaatatatatccaattttcttgtgaaatttagattatttggaattaaacctatttctcttgtcttggccacttgaccggtttagttttttagacgtattttattatttctgtttagaaaataacaacatatatcaactgattttttacttccaatctctttttgtcagcacacaaatagaaaaacgtctgtaagctaagctatcaactaaaacattaacatatataatcttttacgttgatagaaaataaacataaatttctgagttattttttttttggttggtgtgtcactacttacttactactatacctttttaacaataaagaaacactatttctttttctattcaatataatatatgttttctatttgtataaatccattacctttgtttgttttataccaaatgttctttatatataagtatatgccaccttactctattgaagtcaagaacatatcaaaaacccatgcaagaagctcacagagaaagaccaaacacttttgtctctttcttcaaaacttttacatatgatctttgcctcttttcctacaatgggttttgcataactttcaccaaaaccctcctcaaaagcccttcacatattcccaacacaagaaaataaactctaaatccactttcaccaaatcttttcatttttcagctaaaatggattcaactgtgttcatcaataacccatctttaaccttacctttctcttacacatttaccagtagcagcaacagtagcacaacaacgagcaccaccacagactcaagctccggtcaatggatggacggtcggatttggagcaagctaccacctcctcttcttgaccgcgtcattgcttttcttccactccggctttttccggacacgttgcgtctgcaagagattctacagtctacttttctccaacaccttcctcgagacatatctac

SEQ ID NO: 27672 - DNA, 582 bp, Arabidopsis thaliana
aatcacatgaacatacacaaaccaaaccaagtttgagtaaaaatgtgtaaagtaaaagttttgagagaatgtacccaaaaccatgatcaatgtaataaggaagattggataagagagtctcatcgatatcgaaaatccaaatatctttgccatcgccggagaattcgatgcttctcgcgaagatcaaagcttcttcagagactctctccaaatcggtgaggtagcctttacccatcacatagtccttcacgtaatcggcacattccaccgggattgttttccacggcgcgagattgttcatctccgccgcgaatctccaggtcgtacaatgcaaattgacatcttcttcggcagctttcttgtgtcgactctcgatttccgacgggtactcgagaatcgaatcggaaaacgcggaggtaaataaggaaaccaccacgaggaaaatcagataaatcctcatcggagaatcaaaggaaatcgaatcaatcaaaaaaaaaccgaacagagaaaaaaacgaaattagggttttctgaatttctgagaattcacaccaattgagaaactagaatcaaaattagggtt

SEQ ID NO: 27673 - DNA, 609 bp, Arabidopsis thaliana columbia
tcccccctaaaactataatgagaacaatgggagtgaagggtctcactctttaccatctcaaatctcatcttcaggttttgatgctactaccttcaatatcaaattatgcttctttggctacttataacaaacaaagttcattgctttttgactgtgttgttctctggttttttgctcggtagaaattccgcttggggaggcaatcttgtaaagaatcaattgacaactctaaggatggtattcagttatatctttagctaagaatccatttatatctttatggattcagttgtgcatttatatctttgtgaacttatatctctgtagtttcttgtgttgcggagagtcaggacactggttcatcttcaacatcatccttaagattggctgctcaagaacagaacgagtatggtttcaagtgttctctttatgccaagtgttatattcactgtctataacactcattgtttttgtcttgagccaggagttaccaggtcactgaagctttgcgtgtccagatggaagccaaagaagactcacgagcaactagaggttagtgcttcttcgaattcccagatccagagagctttggttatgagagctatatag

SEQ ID NO: 27674 - DNA, 468 bp, Arabidopsis thaliana
cggttggaggctttagtggaggtaggaaaggcatggttttccaaatgaggaggtttaagacggattcgtgtattcaactaagtgtgtttgacatgagttttaaagggaagaataaccatcaatgtaagtggttgggtaacgttgatgtatatttagtgcataatcttagtaagttttaaattaaacaaaatactgtgtacctctcataatcgcgccgtgtacgtctataaagtactcattaagttttctgacacaaggttgagttgacgtctgtatgtaatgtgtataaggggaacaatatggcttcttgtatattgctatattaaggggaacacatttactaaatcttcttttaaataaacaaaactaacttattttatctgccaaatcacttgagtacgttacttgggaaccttgaacgtctaataggaatattaatgagagttgatagaggtcacttctatggtg

SEQ ID NO: 27675 - DNA, 541 bp, Arabidopsis thaliana
tctcattccatctctgaaatactatctaaagctgatgaagtgaaagaatctatcaagaaggttttcccttctatgatcggtttcttgaccaaagtgttcatatcgaactgcatagtaagatcgccaacattcagccctatcctcccttgtcgaacatctatgattgctccagctgtctgcaagaaggatctccctaggattaatggatccttagcttccttctcataaggcaagactacaaagtgtataggaatcatgctctttccaatcatcatgggaacatcaataagaattccatctggaattcgggtagaacgatatgccaagacaagagtaataaaggtaggctcaagattggaatacccaagacgcatagcaactgaacgaggcatcagattcacactagaaccgagatcacataaagctcttgggaaagaatcgtgattgatggtgaactaagtacaaagtccatgatcaagtagctccttggaattcgtcgtgagagcgtgagtgcaacttgctattgagactatggagagag

SEQ ID NO: 27676 - DNA, 480 bp, Arabidopsis thaliana
tatttgctaatgtttttctcaccatatttttgtgtactacaacattcaagacaccatggaggcggctgcagcatcttattcattgttagggtttgcaaagctcgcaaaaaagaaggtcaaccttatgtctatacttaattaggctctcttgttcactttaaattggacaggagtttgtggatacgctataatattttcttatgtttttctcaccatcttattggtacttctacattttggtcactttggagtcggctgcagatctcagtcattgtcacagacgccaccagaagtcaacttcgatggtgaccctatgaaggtaaacagtaacaacaaggctgtgttattcgacatgattatttggttactaaataatttgtaggatattattcttataataggtccctcattttatatttgctaaagatagtctaatacattttcaaaaccaatctcattattgcaggctatggtaatata

SEQ ID NO: 27677 - DNA, 720 bp, Arabidopsis thaliana
cgattccgatccttaccggaatctattgctagctcacgttttgagagccgtggaggtatattccggttttaggtcaaggaacaaaactgttttccgggataaggtagcttcgtttctgcgagagcttggtcacgacgccgcggtttgtgtatcaaaatggacctcttcatccaaactcatcgctgggagttaccatttcattgacgtcgttcacaagccgtcagataatgatcagaaggccgtccgttacttggttgatctagactttgcttcggagttcgagatcgcaaggccaacgcgcgaatacacgcgtgggctgcagctgctgcctaacgttttcgtaggaaatgaagagaatctaaggacgatcgtgagagagtcatgcgacgcggcgaacgatcaatgaagagccgtggcttgtctcttccaccgtggcggagaagctcttacttacagcataagtggtttggtccgtacaaaagaaaggtgggatctagtttgggagtgaagccgttgaatagtgacgccgttagttgccgatctttagggtttgatgacggcgccgtcaatactcgtttgttcatcagggcatgatccatatgcatgtggtatgaagtagactagtataaagtgtaggcgaatagctggagactacacttctttgtattcaatctgactgactatgtatgttctcgtttaatattaaaaaaaaagatttgt

SEQ ID NO: 27678 - DNA, 551 bp, Arabidopsis thaliana
gatgaaccgcaaatcggactgatttttcaaagtttcgatgaacaacttctctcatctttggtggtagaggcgatgcttcggttctagctgcctcacgcctcatagcaaaccaggaaattaatgtggtccgaatgaactctaacaaggaaatgattggtagttcacgggcttctttcaagactgcgttcaaagactccgccacattgctagtcatgacattgtatctttcccaaggaaataagcgcgtgtccaatggcaaaaaccaacagattccaagtatcgggcgcaaccggatctagtcatatcacctcattaaaatatgtttgaaattcacagatccggaaagcccttgcagctcttggcacgtggaacagcaagtgtttctttttatatgaggttgctatgtgtcgttgcagatgaacaatacatgccccgtgcttagcctttggatagacctgcaaattaacatgtgttatacgtgtatagaagggcatattggtagatagcatgtgttctaaaataaataagagccagatgctgtatataccatg

SEQ ID NO: 27679 - DNA, 584 bp, Arabidopsis thaliana
ggaaaacaaaaatcaaaagagggaaaaaaatggtggttcatatgagatcggaccagcaggccatagtggttctgagcgacgctaaaccgtgatccgtccactgctgtaagcgggaagtagtcgctgctctgtgaagccagcctcacgcattaccctccgactctagaacctgcatgagccaagccttcgctcaactcaacactaattactcacagcttggactgggcagctcagaaacatgcccacatcagaaccgatccgaggaaccgaaccagtgtcccaccatcttaatgtccccacatgggttacaagctattgttacttagctcgacgttgaatacatcgtttcgtgtaatatataaacaaacacaaaacgagtagattgaccgatgtgggacaaaagactctgaaaattagttttgatttgtgaatttatcttttatgatgtgggccaaagccttattttgagtccattatagactaccaaaagcccaatagtaatattgaagagacagatttgagatggaagaagagagacaggggcaaagaaagcaaatgcaagaagaagagttattatttgatga

SEQ ID NO: 27680 - DNA, 691 bp, Arabidopsis thaliana
gcaaacctccggtgcattctgtaatcaggcacccctcccattgcaaatgcagctccagctgtagtagttgcacaagggatcagggcatcaccagtacactgcaaaggttccaaagtctcaaccacatcgctcatcaatggcctagctttcgggttctggctaagacaataatacgccaagctgcatgccttctgagctgccctgacagagtattggttctccagtcttgggtcaattatctgcagcagttttcttttatcattcagctttggccgagcccaatcaaccaagttctgctctttgctaggtcttgtcttatccactgattttcttcctgtcaacatctctagaagaacaactccaaagctgtatacatcacttctggccgtcaagtgtcctagtgcattagtattagagtcaagttagtgtttatttgtgtaatggtctaagcacttattgtcatgcaaaaagagagactatgtagctcgaaatgatgttgtgaaaacaagtgcatatatgtgcacggctcaacattctcaacagccacagtcctatatgttaactaatagcaaactactaaagcagagagatagaattagctcctgcaatatcttattttctgtatgtggcactgaattgcaggagaaatagagaccacattcagtgaactatagtgatttaaacggtagga

SEQ ID NO: 27681 - DNA, 502 bp, Arabidopsis thaliana
tgcttgaacgcttagctaatcacccatactactgctttcttgatggatatagtggtttctttcaaatatcaattcaccctaatgatcaagagaaaaccactttcacatgtccttatggaacttttgcttataaaagaatgtcatttggtttatgcaatgcccctgcaatatttcagaggtgtataacctctatatttaaacatttaatcgaggagatggtggaggtcttcatggatgatttttcagtctatggcccctctttctcctcatgcttgttgaatcttggcaaggtattgaccaggtgcgaaaagactaatcttgttctcaattgggaaaagtgtcatttcatggtgaaggaaggcatagtattgggtcacaagatattagagaagggtatagaggttgacatgggaaaaattaaagtgatgatgcagttgccatcaccaaaacctgtcaaagacatcagaagtttccttggtcatgctgggttctcaggagattt

SEQ ID NO: 27682 - DNA, 504 bp, Arabidopsis thaliana columbia
cctccgttttcatcgctgtttaaaaaaaaagaggtcggaccggtcgaaggacgctgagtcaataagcagaaatggcaaaaaatgtgataacaaaaaaaaatgggaagaaatttctaacccgtgagcgactaggtctaaggaaccaaaacagctttagttccggcatctcagacctcagtttcatcccgccgagggatagcactccgctccgctttttcccctccttatccggacgagggagatatggtgactggaggaggaggacccatagatcggggtggcgacgacggtcgaggagagcggtcagttcgggccctcgacttgtctcttttgggggaggagctgctgcgggatggtctgtctctcttcttccgaatcaggtcagcaattggctcgctgctgagtccagatcgggaagtgggccgaggtgagtcacggcgaggtgatcgctccttgtgggatgatcggctgctatgaccttcacggtgaggagtgggtctgtaa

SEQ ID NO: 27683 - DNA, 583 bp, Arabidopsis thaliana columbia
gtacactacaataacacatcataacaaaataaatccatgagacaaggcatctagatcagcggtgaaaacggtaagctcaaatttctacattaccatccccagaattcagcccaataagtaagtcatgcccatccttagcatccggatcaaaagcatgacacatagggtttgaattactgaaatggatagactttactggatcctacatcaaagaagtttcctaaaccattacttccaaaacaaaacaaaaaacagaacattacagccaaatcactaaaaggaaaacaaagaaaagaagaaattaccttttcttgtgagttcaagtcacagataaaaatagcatcactcacattgaagaccaagtaagttcctttcccatcaaaattcgtatttgtcatcgaagtattagaattagaagcagcgaaggagccactaattcttgaacttgtactcacacttttaccgccaccattacctccaacaaaactaagcgcacggctcccatttccagttcctagctaacctcgctgttgctgaacgaaacccgctactagcactataacccgacgaagtaccagttgga

SEQ ID NO: 27684 - DNA, 998 bp, Arabidopsis thaliana columbia
tgtgtggacagaaactggtgtctgtttacaagaaaaatggtgagagtgtgagcaaggaggaggttattgcagctgcagaagagatggcagtaccgaccaatgctctggttgtgccagtgggagctgcattggccatagcacttgcaagctgcgcatttggggcactagcctgctactggaggacgcagcagaagaaccggaagtataattacaatccgcactatttaaagagatataatagtaattatatggttatgaacacattcagtaacactgaaagtgaaagggaaaaggagagatgagttaacttaaaaagaaaaagctcacatggtttaacattctgaaactgagctttgtttttgttgtaacttacagacaacagatacaaagacgttgaggttgagatgccaaagtcgcctgcttcaggtccctttcctcttctcctcttacggattgtatagattcttctcttcaaatttttggaaaattcaatctatatgttataccaaaatagctcctttgtgaagtcctattgaatctctcgcctttcattattgttaccatcttcttctgcagtttctatatcgacggctttttagtctgttggccactttaatacataaaaagcttcataactggttttggttgggtttctttgtggaatgagtttgttgatacgaaaaccataacactgacattgtagtctgaaccagtatcttcaaaaattgttttttcactctctcatctatgaaaaaacaaaaaaacagaaggtataactttaaaaaaaaaatacaaagactatcaattaactatgtcaaagttaaatagtgattaagcttgggaaataagcagtgggtgtctctctgtttttgaatgataaacaaaagttagcaaatgttctttctgattgagtcatatcatatagcactaaaccagtagcctccatgttcgaatcatagactgtcacaactttgagtgactttgagtgactttgagtg

SEQ ID NO: 27685 - DNA, 1083 bp, Arabidopsis thaliana
caaactacatcttcagagataaagccaaggtacaaacctgcactggtgcaacactttcctctaacagggtcataaatccgtttcccatttttgcacaaccatcaacaaaaagctcccaagttcgttctgtgttacctaacagtttctcatgctcctcagtgtaaatctctggccttacgccttctcctacccacaaaacaatctcttctttagacactttacccttcttcagttcaggttcctctgcgtaggaaactggtgtagcgttcttcaatctaaagaccacaacagagaaggcaataaaaatcattactttctattaaaaatcctagcttcctgttaaacccttgattttgaacagaatccaaagaacgaaacgagaaccacagagattgaatacgaagagattacctcgaggatctccgagaaactggcggctcctgcttcaatctgattataaaacagcgaaatgatttctctaaaaaccctagatttctctaaaacccctaattttggaagattgaagcaatgtgaacaaaatcgagagaagtcagtgactgaaaacgaagagattaccttgaggatcgtctagaggagacggaaagctgaataggagatgtttctcgacccggattggcattagagttaccgtaacgccttttggcgggtcggatctcggatttgagtttgagagagagatccatgattccgagattcttcatcctctgaagattctccttgatcctgtcttctctgcatttctcgtagatcgagacgtttgagtttcctcctccgactgttggattagggtttgtgacgggaatcgaacatttcgctctcgttctcaccacaggcattgtgagagattgatgaactgattttggattcaaagttccaatctttccctctttctctctttggatctctggataagaagaagaaatgaaagatttttttttaactttttaagtgagtgaagcggaacagcaacggtctggtttttttactctttttaaaattcaaaacatttttcacctttttaggtaaatgtgcttaatttgccactaatgaaaacgttgattg

SEQ ID NO: 27686 - DNA, 609 bp, Arabidopsis thaliana
ccatcattagttgccgtttgttctactgataaaatgtttttgttttgtctctaaacgaaacgtgcaaatgttctttaaccaagaacaaaaaacaaatgtaatgataccgatattttaggacagttttcccatactctcggacgattttgcccttgtctcattggactctgaatacacacacgtctgttctatataagacacacagctccttaccacaagttgttgttagtctactcattaatcctcacaactctctatctctctctcgccccattctctatcataatgacaggtgccacaccggaaaaccgaacggccccgtcgccaccaccggtgaaacatgtgccggagtcagttctgccggctaaaccaccaaagaggaacaattatgcattcgcgtgtgctatcttagcttccatgacttctatcctccttggttatggtatagttttctcgttgaactcttttccggtcaacgcaaaaaatgaaaactctaccaataatatacacacacacatatctttattgattctaatttaagtgtatattttgcagatataggagtgatgagtggacaatgatttatataagagagattgaagattatga

SEQ ID NO: 27687 - DNA, 948 bp, Arabidopsis thaliana
ctaaagatgactgagtcagccgagaagaatttccccgcttattcgcaccttccttatattcacccatagcattggcatcaactgttgagtatggtgagacagttgatggtgttgtcctggaaaaagatatccagctggtttatgggaccgccaataatacgaaaatcaatcctggcggagaacagcatataaaagaatttggtgtaagtaataatactgaaattaacggagggtatcagtacattgaaatgaatggcgccgcagaatactcagtattaaatgacggttatcaaattgttcaaatgggtggcgcggcaaaccagactacgctcaataatggtgtgctacaggtttatggcgcacggaatgataccacgattaaaggcgggcgcttaatcgttgaaaaagatgggggggccgtctttgtcgctatcgaaaagggaggactactggaggttaaagaggggggatttgcatttgcggtagatcagaaagcaggcggtgctattaaaacaaccacgcgggccatggaggtattcggaacaaaccgtctcggtcagttcgatatcaagaatggtattgctaataatatgttgttggaaaacggcggaagtttgcgagttgaagaaaatgacttcgcttataataccactgtagatagtggcggcttactggaggttatggatggcgggactgtaactggcgttgataaaaaagcaggcggaaaattaattgtctcaacgaatgcgctggaagtgagtggtccaaacagtaaaggccaatttagtataaaagatggtgtgtcaaaaaattatgaactggatgatggttccgggctcattgttatggaggacacgcaggccattgatactatccttgataagcatgccactatgcaatcgctgggaaaggatactggtacgaaagtgcaggcaaatgcggtatatg

SEQ ID NO: 27688 - DNA, 1114 bp, Arabidopsis thaliana columbia
gagatgactttgattttatccattaatagtcaatttgattgatgagttaagaggatgattaagaaagcaataaaggaagcgaatcggaatccacattgtattaatctttttgatccagtagccattggcgaatccaggagtattaaagttccattttgattttggcgacgatgatgaacagagtttagagaaatttgcattgaagaagagaagatttttggattttgtgtagtgggagaagggtaaaccctagcttgggagggacatgatcggatgctctaagtagcttgtgaattagagaaagagcaagtgagcaaatatgatgaacacttcgaatgggatgatctctgggccttcttcttcgtcagcttcggcggcgaatcctcagtctccgggaatcaaaacgtatttcaagacgcctgaaggaaagtacaagctccactacgagaagacgcatccctctgggcttcttcactacactcatggcaaaaccgttactcaggtgaagatgtgattcgttgtctttggtgtttatttttgaattgaaagtttaatccaatctgatttctttgcacttgtgattgctattacgaaattgctattaggttttgtgtaagaatatcaaatgcacatttcatttttatgttttgaaagtggtttctgagaatggatttgtgaaattttggtgtcaggttactctagctcaccttaaggataaacctgctccatcgacaccaactgggacctcgtcaagttccacagctagtagcggtttccggtcagcaacagcaaggttattgggtggtgggaatggtaaccgtgcgcttagttttgttggaggtaatggaggggctaaaaatgtgggtgcaagttcaaggattggggcctcattcgctgcttctagttctaatacctcagctactaatacaaatttcgatgggaaaggaacttacttagtcttcaatgttggtgatgctatttttattagtgacttgaactcgcaggacaaggtaatcttacctctactcgttttgttttcttaagatttgatttgatctgctggttgtttgcacatttatgagaaattatttgatttaggatccagtaaagtcta

SEQ ID NO: 27689 - DNA, 555 bp, Arabidopsis thaliana
cgccagtgtgctgtaaagctggctgtttttaaccgtctcgttgctatcgcacagcttgctggattcggtaacactggcgggaaaggggttaggaattcccagtacacacgacccacccctatatagctttatagccctttgccctcttggcaccaacatacattgaaatgtctgaggagacaccggttccaaaataaaatcaaatacttggacccggtcgatgaagtctcggacctggtcgacgaatcctcgaacccggtcgatgaagtctcggacctggtcgacaaatcctcggacccggtcgacgattcctcgtcctggtcgacgattcctcggatccgagagatttttctggacgatttccattccgggaagacgattacgcggagcatatggagttgcccagtcgatcgctttacgggatccagacgctgttgaattaacgcttcaatctcagccacttcgctgtcgtctgcctgcgcgccggtttgcaggaacgcttccggttcttgctccagaggccaatacagcggaaagtttcgcaggtgagatgca

SEQ ID NO: 27690 - DNA, 1822 bp, Arabidopsis thaliana
  unsure (1)..(1822): unsure at all n locations
acccagtgttcaatatgcgcggataccacggtttgcgtgtggatcatcgcacagggtggtgtgtcaaaaccttcaatcagtaatccgctttcctgattgatattcaggctgaaaggaccgctgatcttacttgcaccttgtgacttcaaccnacgttcccgtgcgccaaacaacgcggcaaaaacctgcggatcatcaatggcgtcaatcatgccgaaatgaccggtatctttgccgtaacgctcgcggtgcaaggtatctatttgcgcgataatacgcccaactatctgccccgctttttttgccacccacgcctgccagatgatatggtccgtccccggatttttcgcagacaaatgctcgttgcgttcaatgaataaagggggtatccagtttggatcgtcgggataaagtgatgacggaaaagcgataaatgccttaaggtcatttttattaaggaaggtgcgaacaagtccctgatatgagatcatgtttgtcatctggagccatagaacagggttcatcatgagtcatcaacttaccttcgccgacagtgaattcagcagtaagcgccgtcagaccagaaaagagattttcttgtcccgcatggagcagattctgccatggcaaaacatggtggaagtcatcgagccgttttaccccaaggctggtaatggccggcgaccttatccgctggaaaccatgctacgcattcactgcatgcagcattggtacaacctgagcgatggcgcgatggaagatgctctgtacgaaatcgcctccatgcgtctgtttgcccggttatccctggatagcgccttgccggaccgcaccaccatcatgaatttccgccacctgctggagcagcatcaactggcccgccaattgttcaagaccatcaatcgctggctggccgaagcaggcgtcatgatgactcaaggcaccttggtcgatgccaccatcattgaggcacccagctcgaccaagaacaaagagcagcaacgcgatccggagatgcatcagaccaagaaaggcaatcagtggcactttggcatgaaggcccacattggtgtcgatgccaagagtggcctgacccacagcctggtcaccaccgcggccaacgagcatgacctcaatcagctgggtaatctgctgcatggagaggagcaatttgtctcagccgatgccggctaccaaggggcgccacagcgcgaggagctggccgaggtggatgtggactggctgatcgccgagcgccccggcaaggtaagaaccttgaaacagcatccacgcaagaacaaaacggccatcaacatcgaatacatgaaagccagcatccgggccagggtggagcacccatttcgcatcatcaagcgacagttcggcttcgtgaaagccagatacaaggggttgctgaaaaacgataaccaactggcgatgttattcacgctggccaacctgtttcgggcggaccaaatgatacgtcagtgggagagatctcactaaaaactggggataacgccttaaatggcgaagaaacggtctaaataggctgattcaaggcatttacgggagaaaaaatcggctcaaacatgaagaaatgaaatgactgagtcagccgagaagaattccccgcttattcgcaccttccttaagtaattgagtgttttgtgtgatctgcatcacgcattattgaaaatcgcagcccccctccagttgtatgtgcgtgtagtgacgagtacagttgcgtcgatttaggaaaaatcttagataagtgtaagacccatttctatttgtaaggacatattaaccgaaaaggtgg

SEQ ID NO: 27691 - DNA, 592 bp, Arabidopsis thaliana
gaatccccctattcatgactaacggtcggagatagcattatggtcccatacaacaataagaaatacttcatagacatagtggaggcaaagccttctaatggtattagcatcattgaaactgattgcgaggttgatttcgcacctccccttgattacaaggaacccgaacgacctgtagcacctgctccagccaaaggtgaagcaaaaggtgatttgtatgaattggacatgaaattagctccaagctgttagattctaatgtggtcttctttttttgatacagctaaggaggttgatgtggctgaagcagaaccaaagtttaaccctttcacgggttcgggaagacgtttggatggacgacctttatcctatgaaccgcaacctggtgctgctaacagtaacggccaatcacatcctgttgcaagtagtagtagtagtgggtcagagaaggctacgcaacaaaatcgagggaaacttgtgttcggttcaaatgtagagcggtctactaaagagacaacaaaggtaaataacttgtttaacagtagtatgtgcaaaaaatggtatcagagataagagatggagtagaaatata

SEQ ID NO: 27692 - DNA, 547 bp, Arabidopsis thaliana
gatgggccctatgatgcgatataaatgtattaaatgaagcatcgggagtattcctcctcaccgactaaaacgttcttgtaagcagatttctccaaaatgtagtcgaagggagtgaaatcgaaatctggaactggtggtgatctcggtggggcctcaacgacgacggtccgatccataaacaatatgccgtattcatgctttgttgctctgactgagtcagttgccttacggaccaagaaagaggtgatcgtcttccactcattttcaacgaatcggtcttcgtaaaatggagcaaggcgacgatcaacggtggcctcaatacgggaattggatccctacagaacatgatagtagacagttttatatacaagttaagcgaatgaacgaaaaaaacacataatgatttgacggaaattaccgcgtaatctgccaggataaggccgagttcgaagacgttaggcgatataacgttcttgaagactctcacgacaaagacataaattcgcccacccagtgatctgaggacacatatctgagaccatatgaa

SEQ ID NO: 27693 - DNA, 552 bp, Arabidopsis thaliana
ttaagtgtgtgttgttcattagtaacaacaaacataaatctcactcaagacattggttacgaaatgtacttgtctgattctatctatgttgctaatagatcttctagaaataggcttatcatacacatagggttttaactccttgcaaggttgcagagcagccttatacttattttagatcttggaaatataactccaacaccaaaacaaagggaatcttttttacaaagaaagactatttcaaggataagagaagcataaacaatagagaggagagagagactgacaagaaggttggtgatgaggaaaactatgttgaagaggatggtgaaggaaatgcataggagattgatggaggagacttttcttaataggtaagagaagctcttgaggaacagaagcaccagccaacatgtatctatagatcagtgcttgtagctcaagttcttgccactgtgcccagctgaagaagtttccatctctacatatatatgtaacatagaaacgtcagattagatatcagcaaaaacaacttcaacattagagtgaata

SEQ ID NO: 27694 - DNA, 540 bp, Arabidopsis thaliana
cccgtagctggtcgcacaactcaaagacggatacatcaaaggtgatagaacaaagcacatcctaccaaaattcttcttcacacacgatctacaaaagagcggcgatgtacaagttctacagatccgttcgaatgataatctggctgacttattcaccaaagcgctacctactgctacttattcatcgtatcggattacgccgtctcaaagatctcgatgaatatactcataagggggagtaattgtgtgttgcactctttttcccttaaccatatggtttttcccattgggttttcctgttaaggtttttaatgaggcaacattttaaatactttacgagttatgatactataatggtcatcaagggggagtgttatgaataatagatggatgcccattataaggccaatcatctagatgtctctagggttttacccttctcttgtactcctatataaatgatgttttattcaatggaataacacactcatttcttctatctctttctcttgttatacaaaaaaaaagttatctatatat

SEQ ID NO: 27695 - DNA, 909 bp, Arabidopsis thaliana
tcctccatcgtctctctcgctctctctccgtcgcgacgtttgctttgttttcttctgaaaacgcttaggtcactttttgtcaattcggatagcgacacgtaatcaaccaaataacggccctttattataacttaatgggcctaataaggcccaattttaaaagactttttaacattcgaaattaccctatttgatgacatcatcacccaaaaacatgcgcctgacagaaagataattgtcgaatccgtcaaatctcaccgagccggcagaatccaacggttaatatttagacacgtcatcattaattaaaaatattgactaatagttgacaacgacgacaatacgaccgtatcagatctctctctgcgtttaaaacttcaaaaaagctcacttttcggtaaaagcttaaaacagaggatttagcaagagaggatttagcgagagagagacgttgaagaagatgactagtggaggaggatacggagatccgtcgcagaagattgattatgtgttcaaagtggtgttgatcggcgattccgcggttgggaaatcacagatactggctcgttatgctagagacgaattcagtttggattctaaggccaccatcggcgttgagtttcagactcggacgcttgttatcgatcacaagagtgttaaggctcagatctgggataccgccggccaagaacggtaatctccgacctctcccggaacttttagctacttcaattgcttgaacttagatctcgtaagattttactgtttctctagatctggaagatgataggtctgcttaggatttcgaattctagtaaagcttactgatctgtatacgaaattgggaggatctgaagtaaaatggtagaatcattgagaatttgggattgggatttcaaattatgtata

SEQ ID NO: 27696 - DNA, 432 bp, Arabidopsis thaliana columbia
ggtttagattattgatctctatataagagttaccaaagttgtggtgaaccttaagagaatttgagattgtgaagagatcaatagctttacgttttgagtgagttttctaaagaaattaaagagagttattctttattttgagttcttaaacatttctctaaaacaagaattggtattagagctttaaaggttcaatcaaaccaaccaatccattaagagagaaatatgagcgacgttgtggtggtaacggagaaacaagcaagtggaggcggaggagcaccatcgtccattcaatgtcccatgttgaactcgagtaactataccgtgtgggccatgaggatgagaagtacactcaaggttcatgaggtttgggacactatagcgactaatgagtccaatgaaaagaagaacgacatggcatctgctttgatg

SEQ ID NO: 27697 - DNA, 501 bp, Arabidopsis thaliana
tgttttgtatggacatcgattcttgcaaaaggagcatataggtcgagacatatgttgattgttgggcagaacatctacctttttaccgtagaagatccacgatgaagcgggcttcatgtataagtcccatccaagcagacatataatgtgtagggatacacaacagttctcatcacaagtataaaaccgctcttttggatctaattttctctcacaaacttcacaccaatatgtcatggtacttgtttcctctccataagaaagattgagcatatgcttatcatgcttgtacctcaccttttgaggtaaactaacacattcaaaacacaaagaaaagtcacactcaaggcaattgaatgtttcatttgtgcgacaataattaaaatctttgcaaatcgaacaaattctccgttgctctcctggtttggatgttaggaataaaggatgcatatgacctccattgactaatggctcggaaattgtggcgcactgcacatgtag

SEQ ID NO: 27698 - DNA, 665 bp, Arabidopsis thaliana
  unsure (1)..(665): unsure at all n locations
ctcttcttaccaagctctcggtggtcacaacgcaagccaccgtaagaacttatcacagactctctccggcggaggagatgatcattcaacctcgtcggcgacaaccacatccgccgtgactactggaagtgggaaatcacacgtttgcaccatctgtaacaagtcttttccttccggtcaagctctcggcggacacaagcggtgccactacgaaggaaacaacaacatcaacactagtagcgtgtccaactccgaaggtgcggggtccactagccacgttagcagtagccaccgtgggtttgacctcaacatccctccgatccctgaattctcgatggtcaacggagacgacgaagtcatgagccctatgccggcgaagaagcctcggtttgactttccggtcaaacttcaactttaaggaaatttacttagacgataagatttcgtttgtatactgttgagagttgtgtaggaatttgttgactgtacataccaaattggactttgactgattccaattcttcttgttctttcattttaaaaattattaaaccgattctttaccacatattttacaaacgcgttgagtcttttttttacgtgaataagcataaagtgacaccactacaactctgtttttggttctgtttnttcaaaaaatttat

SEQ ID NO: 27699 - DNA, 787 bp, Arabidopsis thaliana
aacatcaatcaaaatcgatatttgtatatacagtaaaacaatttcctataaaatgaattctgtaaagtttttcctaggtttatgtttagggtttctccgggaagtcaaaccggagtttcttcgccggcataggactcatcacctcttcgtctccgttgaccatcgagaattccggtatcggcggtatgttgaggtcaaacccacggtggccactgctgacgtggcttgtagaccccacatcttcagaattcgacacgctactactcacaccgcctccgttctttccttcgtagtggcaccgtttgtggccgccgagagcttgaccggtggcgaacgatttatgacagatagagcaaacgtgcgacttcacacttcctcccccgccaccggatataccagacgtggttatcgccgacgatgtcgacagctcatctcctccggcagattgagtaagcgaaaagcttttccggtgacttgccttgtgtccaccaagagcctggtaagacgaaaacgccttgtcacagacgctacacttgtagatcggagtaggaagaggaggaagcagaggaggtgaagacgaagaagaaggcaggtcaaggtcacggtttctatctccgtcgcgagcaagaagcatgagacataaagcgatatattcatcctccgtgagactctgacggtcgaattcagatcttgatcgcttagatcgtttgcctttgcttccatgaaaccctagtgctgaatcttgaaacagagtcggcatcggagaagataatcttggagaagtaag

SEQ ID NO: 27700 - DNA, 489 bp, Arabidopsis thaliana columbia
ctgaaattacatattcgtccagaatgtgttaagttcacataatgggcccagaatataactttataaggcccggcccacatatatcaaagcggccattttcgtaatttctccacggcgagaagagaagataacggcatttcgatcggagttttgatcggcgacgatggagagaaacgttgagaagatgctgaacagagtttcagtcgtgttcttaagcatcggaacagtgttaatggtgattatgattctccagacgccaaaacttgtatttcaccagaagctccatcgaaacctcatacgcattttctgagatctacatgcgattcatcgcctcgtcagcatcttcctctcccaaagaagaacgctcgaatctggttctctggagcttggaaatcgcgtctatcctccttctctacctacttcctccgatttcgcgatctcggattcattcaaaatcacaccaaagctctctgtctttccgacggagca

SEQ ID NO: 27701 - DNA, 923 bp, Arabidopsis thaliana
tacttcacatacaatctttcactcatatatataccacacagtcacacattctttataatgtaaatcaaaagagaactaaaccaagaaacaaaatgggatacgaaaggctcggaccatccggagcaactggttcggtcaccacctccactactacagctccaatccttaaccaagtctccacgtcagagcaaccggagaacaacaaccgaagaagcaaaaagaagcttgtcgtatcatcaatcgtcttagccatctcacttatcctcgccgccgcgatcttcgccggagtcagatcacgtctcaagttaaaccaatcagtcccaggcctagctcgtaaaccgagtcaagcaatctctaaagcttgtgagttaactcgtttccccgagttatgcgttgactcactcatggactttcccggctcactcgccgcttcctcctctaaagatctcatccacgtgactgtgaacatgacgctccaccacttcagccacgctctctactcctctgcttccctctccttcgtcgacatgccgccacgtgctcgctcagcttacgactcttgcgtcgagctacttgacgattccgttgacgcgctatcacgcgctctttcctccgtcgtatcctcctccgctaagccgcaagatgttacaacgtggcttagcgcggctttaacaaaccatgacacgtgtactgaaggattcgacggcgtcgacgacggtggagtgaaggatcatatgacggcggcgttacagaatctttctgagcttgttagtaactgtcttgctatattctcggcgagtcacgacggtgacgatttcgccggagttccaatacagaacaggaggctgctgggagtggaggaacgagaagagaaattcccgagatggatgagaccaaaagaacgcgagatactggaaatgccg

SEQ ID NO: 27702 - DNA, 515 bp, Arabidopsis thaliana columbia
cgttggaaaagaggaagctccgaaaaaagattaaccgaatgttacgtatagtcaccgtaatatcaagggaacttcacaacctcaactctcatctcggggattggatcgaacttggaatctccgaattcgctcgcatcccggattgtatgatgccgatcatctatcttgctggccaaggagtccaagtgttttgtacgtcgagaagggtttcttaactcgaaatgtatacgtggtgaaactcatctttttgcttattgcttgaataaatgtcgttttatatcctgtatttgtatattcgcacagtcgaactttacttttctttgtttgttcgcataatcaaactcctttcccttttaatgaataacacaaaattttattagtagctgaactcgtttccgagctgcctacgtaccaatttcggatcaagccacaccgtagttcatgtacataacaaaaacgcgagttaatttgaacataaaacttctttaagtcaccacattccaagaacgttggac

SEQ ID NO: 27703 - DNA, 1524 bp, Arabidopsis thaliana
tttcgattcggttttctaatgaatttagtatgctgttacttcagaaacaaaggaattgaatcgtattgtgtattggtaatagaatcaacaaaactgttccttgaaattgaaatttgatatttacatttgataaacttccaggtcttcaacaaagacttacttcaggcgaggcttcttagtcgccatcggactcatcacttcgtcgtccggcgaaaatccctgcaccggtataatattaaggtcaaatccacggtggctactactgctgacgtggctagtagaccccacaccttccgagttcgaaacgccaccatcgtagtggcaccgcttgtggccgccgagagcttgaccggtggcgaaagatttcccgcaaaccgaacaaacgtgagatttcacggcggtggatggtgtcgatttatcattctctccaccaccgtataagctccggtggctcgctttatgaccgccgagagcttggtaagacgaaaacgtcttgtaacaaacgccacacttataactcggcttctccgcaaccgtcacagagtcaagatcgccgccatcccgagcaagaagcatgagacagaaagctagatactcttcctcagtgagacggtggttatgatgaagatcagatctcgaacgtttggatcgtttcttacatttggtccactgctcaacgccattgaatcttaagggatcctcgaccaatcttggtgaattaagagcttcaagcgccattgctatagaaaatttaaaacctaatttgagagcagagagatatatagaagaaggtgaagtatggagaagaatcttgagaagagaggaagttgcgtgagaaagaagagtgagagtgggtggccaaattggccattctaattattttaagtatttagttgaaacgaaatatgtgctgagcaagttgtttgttgtaagttgtaacgaaagtgaatgtataattaaaatattatttcaacatttggtgagagtggaatatattaattttggcacgttttgtgggggagagaaatgttacacaagtcgggctatatactcttcttctgactagttgagagttgacatttgaatccaactacacacaataatgattgattctttaaaactaataaaaaccttgtctctaaacttaggccgtattttacaattaatattcatctagcttttcatttatgttttaacactttgcttatatatgtagttatttatttaagtgtaggtttgttgtacctttgggaatttctgaacaaacccaatagcattcattacttggtccaaacatttgaaaacggaggcaatgtgtgtagattaagattataatgaggaaaccttgaatataaaagatgattggatgtttcggtagagaactcatgacaacaagaaacaaagagcttataacttaattcccacagcccattgcaaccaagaatcatgaaattttctttattggttttaattcaaatgcgtgaatgtctagagttgaagttacactaaattggattcaacaac

SEQ ID NO: 27704 - DNA, 608 bp, Arabidopsis thaliana
acagtatattaacttgcggaacaatctgttcgactacttctcctcctgtgcaccatttcagagccaaaacgacattgctttgggacacaactccaggagagtttcctttagcagctaacccttccattgtcctacatgttctcactgaatgtagattggatcctcgtgacctcgctaatctcgaggttttgtttcgaaaatgtcggaaatgttttactgaaattttcgaggattgattgttctgctgatttgattgttgttgttgttgttgttgttttaggcaacatgctcgttctttagccagccagcaaactttgccccggacattaacctatcactatcggagctcgctgctctcgacatgtgtaataaaagggtgattttcaagccgatgaatgaagaagaacgtcaagagatgaaacgtaggtgcggaggatcatggaaattagtccttcggtttttgctggctggtgaagcgtgttgtcgaagagagaaatctcaagctgttgctggtcctggtcatagtgtagcagtcacatcgaaaggagaagtttatactttcggatataataactctggacagctaggacatggtcatactgaggacg

SEQ ID NO: 27705 - DNA, 542 bp, Arabidopsis thaliana
ctctttggcagacaaagcccacctctagttgaagtcactggactctacaaatctaagaaattgggaagactacaaagctccatttttgggacagtacttcacgcagtttaggacacatgtcctaaggaataagatcaatagcttccaacaaggagtcattccatgaagcttgggagaggtttaaggactactatagggagtgtcctcatcatgggtttccacgagataaattaattagcactttatataggggagttgacaaggcctacaagatggcaagagacaatgctagcattggggacttcatgaccaagactgaaaatgaggctatagagctaattgagaacaagtaaacgaaagcgctaggtcatcatggttttctccgggcaacatggttcaaataaaggtttagattccaattcaggtgataacatggttaggtttgtttacttccaaattctcagacatacgaaactcattcaagttcggttaacctaacggctagtaggtggaaccagctaatctcctgtactcgctactag

SEQ ID NO: 27706 - DNA, 583 bp, Arabidopsis thaliana
tggaattacacgtgaaggagggatggggacatatttaggccttctagagaaaatccatgggtcaaaagcccaagtcttcgcgtctgtgagagatagattacaaactcgaatgaattcttggtcatcaaaattcctctcaaaagggggaaaagaagtcctaattaaatcacaagcacaagctcttccgacatatgtaatgtcgtgtattctattgcctagagcaatatgctccaaactagccagtgcgattgccaacttctggtggagtaataaagctgagagttgaggaatacactggatagcttgggaccaaatctataaccatctatcagatggagggttaggatttaggtctttggaagattttaatcttgccatattggcgaagtaattatggagattactacgattcccggaatctctacttagtcggatccttagaggacgatactttcgatattctagtccgctagagatcactgtctctaaccgtccgtcatatggttggataagcatgttggctggcaaagacgttctcaaatatgggattcgtagaactattggcttagggtttggacatgca

SEQ ID NO: 27707 - DNA, 782 bp, Arabidopsis thaliana columbia
cccatgtcaccacaaacagagagtcgaccacacgattgctttcaatttgggcttcttcttaattttggtgaactattgaggatttttgcaagtttctgtgtgaatcctagagtagaatgactcaaaaatgatttcttttgattcaattatatgcgattgttaatgtctttgaggttctatgatctggaattagattttggtattatcttagtatatcaaagcttagatgatgtttctttagcatgtaactactattgtccatataaattgcataactcatttaactttcgagcattctctgcgtctcgattacttatatggttcctttgtttgtttttgttcagattcttgtccttttttcagctcaacaagaatggataattgtactggagaaaatcccatggcttctcagttgaacattctccgatgcccgttcttgaggaacatcaatgagcccactaacctctctttctcttcatccttgccttttcccatccctgtaagtaaccgtctgttggttcactccatattgacatttcttatagattctgatcttgtctcatcatatatataggcaagagctgggaaaggacctatatttgaagatggtcccaattttgatacggcgtttaggcttttccatggccaagatggagttgtcctctctctgacaccgctcgaactgaagcccagaagcctgtgcctgtattccatccacttgctgctaaggcggccactattagtctctcatcctttggatctggagggccttttggatttga

SEQ ID NO: 27708 - DNA, 507 bp, Arabidopsis thaliana
ttttcatcagaaataatgttgttttcggaaagctaattcaagggaaagagatattgaaaaaaattgaacgtgtgggtgatgaggaaggtaaacctactgtcagcgtgaagataatccgttgtggagaatattctggaggtacgaatctgctcctattggtttctactacataagtcatgatttcacaattataaccaatccatgcagataagaagaaaagtgacggtaaaaaaaatggaaagcacaagaagtctttaagagtgagaagaaaaaagaggcgaagacactcttcatctgagtctgagagctcttcagattctgagacagattcctcagaatctgatagtgagtcagattcagacttgtcttcaccttccttccttagttcctcgagccatgaaaggcagaagaagagaaaaagaagttcaaagaaagacaagcacaggcggtctaaacagagagataagcgccatgagaaaaagcggagtatgcgtgataagagaccga

SEQ ID NO: 27709 - DNA, 542 bp, Arabidopsis thaliana
atgatgatttactttaccaaaaaagaaagaataaaaaagtagagaaagtgagagagagagagagagaggattcacagtttcatcgcttcttcctgtcaacttcaggtactccagtgtaacatgatccactgggaagaaacccatagttgctccatactcgggagacatatttgcaattgtggctctatcagccagtgaaagttcactcatcccctcaccttcgtattgaaagaaataagttaaaacatggatactgaccaaataatagtccatcagaaataaaaagttacgcagccatggttctcaccataaaattcaacaaacttgccgacaacaccatgcttcctcaatatttgggtcacagtgagaactaaatcagtagcagtaacccttccttcaactttccatccaacttaaacccgaccacgccaggtaacaccatgctcatgggctgataagtttttgaagtaccatatgactaagatgagtggcaagcaaatttgacacttacaaataaaaagtgaaggtgtacagacgaaatg

SEQ ID NO: 27710 - DNA, 1190 bp, Arabidopsis thaliana
gctagtatacaaagttgtaaattttcgcctaactcaccaacaaaagcaatatgaattagacacacaagtaatgtttatctacaactaaactcctttcgtaaaccctttttttctttcaaatcaaacagctgtaactgagtaagaaattcaaaccagattacaacagcccatgggaatgacgagaaataatttgtccaaatcgtttcctttcaaaccgacacaaactcacaataattattatttttccactcgattttgtttgcgtcccaccaaaaaagaagaaaacaaaaacaaaaaaagggtgaaaaatcaaatcagagatcttctgcggaagggtgcacctgttcctcaccaacctcaaggagatcgtcgccgtagatttgatcaagcacaagaaccaatcccattgcaaaggctccatcaaaaccgggcttcacgttcaacgagaaaacgtctttcccaagcatcacgttcgttgacgcatccactttgcgccttatctccgccaccttccgcctcgtctccgcctccaccaccgtgcagttccttgccccgaaactaccttctatcaggtactcgctgcactggtagtccccgtacacctccaccgtcacactgttcctcccgattatcgaagatctccttaccccgaagatcggtttctggccgtccgatctctccccgagatacccctcccatctccgtcgcaaactcggcctctgtttcaccaatttggaaatttaaaaacagagtaagtttcaactcccagcgagttaagagaaagtcaattccaagaaaacccctttcagatatttttttctttcaaattcgatcacaaactaatgaagagaatcaaattaaaaaaatggaggcacctttcgtcggagggtgaggagacaacggccgtgagcgtccatgaggacaacctcgtcggtgtcgcgggtgttgggaccaccgtaagagtcaacccgaaacaccaaacttcccttgcagtcgtaaactgtgaaaccatcgccggcgaaaaacagagatgttttccgaacagtcaggctcctttcttctccgtgtataaattcatcgtccacaagcaaaccccccttcatgttcgattctactcttttcttttctttcttgtggtgatgatgcttttaagctttcgatgagagagtttacttattggagatttgaga

SEQ ID NO: 27711 - DNA, 1362 bp, Arabidopsis thaliana
tgttaataatgatttatttttttgttttctatttctttaagaagaaaaaatttaattgattttttttttagtatttctatttctttaagaagaaaaaaattaattatgttcttacacgtgtcaacatctgatcgatagacttgacacatggcataatcctatgagttagtaattttcaaaaccatactttacataacaaaatatatgcgattccattactcgatttttttaagtcacttctagctattttatatttgagcaaccgataaactaagaacagaacaaagacagaagtgttagaattgagtggtgcagtgacgaacgtatggttaaattattgaatatcgtatcaaatagttaaaacaactaaataaaaatatatatatgcaccatgctttatgagttatgagatgaattgaatttatgttataaaaaggttattgtacgttagaacttttaggagtagtgtagaaccctaactgtacaaaatcagtaacattacacagctgtgttccattgaagtctctgcttatatacaagaacttgctcattcctcaaagcatccacacataatcacgatgaagctctttgttcatctctctatcttcttctccatcctcttcatcactctcccatcttcttacagctgcaccgaaaatgacaagaatgccctccttcaaatcaagaaagcacttggcaatcctccccttctatcctcctggaacccccgaaccgactgttgtaccggctggaccggcgtcgaatgcactaaccgtcgcgttaccggtctcagcgttacctccggcgaagtctccggtcagatctcgtaccagatcggcgacctcgttgacctccgtacactagatttcagctacctgccacacctcaccggaaacatcccacgcaccatcaccaaactcaagaacctcaacactctctacttgaagcacactagtctctccggtccgattcctgattacatcagcgagctcaagagcctcacgttcttggacctttcttttaaccaatttaccggtccaattcccggttcgctatctcagatgccgaagcttgaagccattcaaatcaacgataataagctaaccggttctataccaaactctttcggttcttttgttggcaacgtccctaatctctacttgtctaacaataagctgtcaggtaattagccatcattttccatttctttaatagttaatactatgcttttggtcaaatgtttatttattagtttttggcttggcttgtgttcaaagtcaaatgtttatttatgtcggaatcgtagaactagcctcgtgccttaaagtgttaatgtaaccactaaccaatgaagattttagg

SEQ ID NO: 27712 - DNA, 646 bp, Arabidopsis thaliana
tagttcccgtcagtgagcacctgtcgattgatctgttctagccaagttcctcctccaagtaccacgttcagtttcacggctggataagcagtgcatttccttccctgcaccagccagtgaacaggtcacatagaataaattcctcaaacaacttgtagtggcaagaaaaaggaggacatagttaaataaaattagagctacgaaggaacagtgctgaccttgaggacaccagcagcagctaagatctgttgtccgtggcaaatagacgcaactggtttctcagaattcatgaactctttaactatgttaaggacatgttcgttcaaggccagatattctggtgctctgcctccaggaatgaccagagcatcataactcgaggaaactaggtcatcaaagttagtagttaaagcaaaagtgtggcctggtttctcactgtaagtttggtcaccctcaaagtcatggattgcagttgggcagcgatcaccagccttcttctctggacaaaccgcatcaacttgacatcccaaagcttgaagggactggaaaggcactttgacttcatagtcttccatataatcctgcaaaggtcaaaaattaccaaaagtgtgatgttcatatcaggagattcaacgacgttactaga

SEQ ID NO: 27713 - DNA, 725 bp, Arabidopsis thaliana columbia
acacaaaaaaaagatggatctaaccaacaacaagagcatcaacatcgtcaaaaccctagctcgatggtgtcttcttttacaagctttcatgatctcgtccaacaccgtggctcttaaggaaccagactacgtaaacatgaacataacaatccgtaactcaatgacgggattaatccgcccggaaatcgtgtatcgatgccaatctaaacgcaaagactatggttggcatcgatctccaaagccaggagtccaattttcattcccaatcatcctcataaaaggcgaaaccaaaataccagcgattcacatctgccaaatccggtccgtgttaggaacggctacactcgtgatccaaaacacctatctggacgctgagatgtgccctagatcgtcgtgtgctcacgaggcaaccccgaaaggaattgtgtttagaggccttgagtgggatttcaaaaccgtgtttcctaaactcaaaccagttgagtatctagaattgccgtggacaccttggccaaacagaacgtaaattttttgtcatcttttttttgcttccttttgtattgaatgtaattatagatattattcataatcagtttgtcacatacaatctcttgcacagatatatacctttaagtaacactaaaaagcagaacaaaatccttttttaaacgttcatagcttcaatcgaactgacagttttgactttaggcataccatgtagtttt

SEQ ID NO: 27714 - DNA, 828 bp, Arabidopsis thaliana
tcttatcaccaatctctcatccatatctagaagatcaccatcgtcattgtatgcttcatcccgaaacacagagtctctcatgcctttaatactcacatagaatagctctggatgtctcacaatcaagtctcttaacttattcggtaaagaaaactccttcctgaaatgtgtcaaatgatcaatcaaggtcctcttctcaaccgttaaccccaacacctctcttacaacagcgaatgctcagtttgaccgccacaatcgactcacttgccagatagtcagatgacattttgtaaggacacacgtcaggtgattctctgaactttatcaagaaaccttggtgccgtctcttcaaatttaaacctctccgaagattcaagcgcttgaacttcaaaggacgatcaacaatcaaacccctatcaacttcaggagatggcatttggttcgccaattcgggatccgacgagacaagctccagtgctcttccataggaagtatccacagtcttgaacttgtccggatagtcattgcagagccgagacctgaaattaggagggaagccaaaatctggggcaatgtgaaccagtttagacaaaagcaacctgcggtgagatgacaacattagtagcttctggagcttagtagccaatttatcagagatctcagacttcagattcaattcttgcattgcaagggatgatgcagccgatgtcaaacgaacacagagttgagataacggcttagtggcattcataggcaaatgtggcgtaggtgtcgtaaaaagttcaaagattgtaggatactgcggatcattgagagaatgccaatgga

SEQ ID NO: 27715 - DNA, 512 bp, Arabidopsis thaliana
gatcttgaagacaacaattacgatgcctagagagagttgttccaaactcactgtatgacgtttgacgtctctggtaatatagagggcaaccttcttcccaccggtgaggacgacatggcgtggcaaaagcgagacggtctcgtcaaactctggatctacggaacccttgcgcagcccctgtttcgctccgtgttcaaaacttgcggctctgctcgtgacatctggcttcacgtggagaaccaatttcgaaacaataaggaagctcgtggagcttgacaacgagctacggaccatggagatcggagatatgatgattcgcgactattgtcagaaagtcaaatttgttgctgatttactcaccaatgtcgctattatactcctttaaaattccttaatcatttaaaaagattgaatcaataaccattaaatttgattattagaattcaaaactatcaaaacaatcatatcccaataattacagtgatttcaaattttgtaatcattcagttacc

SEQ ID NO: 27716 - DNA, 1346 bp, Arabidopsis thaliana columbia
tgtgctttacctttgactaggtgggaagactacaagaacagttgcagcaagagagagacaggaaattagctctggaaacaggactgaacatgtcaaaagggaatcaacctattccagaaacaatcgatgaaaatgttgctcctcttcatttttgtctagcaactagttgatttttgtcaggctaaaagtacatatatctaacttgggagacattttacagttgaagaaagatctgcaagaggtagctcaagcggaggctgatattgccaagttggaacataaggttgatgatcttgaaaataggcttggtcaccatgacggaaaagcctctggttctacgcatagtgccagcaaagaatctcggaaattgccagagcacaatgcgaagatgtacggattcatcaacagattcacatttaacctcacaacctatggtttaaataatatcaaagctaattactcgtcttctttcaaatttgtcactcaggaaggagaaacaaaaagatactgaagcagcctctactcacatttctgaaagatcaacgtccaaggtaaccactgtaaacatttgtctatcaattttgtgttttcttcctctgtatttatcctctacagacgggtaacatattgcaggatgggcaaggggctgcaagagaaaatgagacagagaagcaacaggattcacggagcaaaagctcgcaacaagaaacatcacgtggcagctcaaaactggtgggcttgtcaaagaggtctggcacaaagggagaggtaagtttcatagtgtaaccattaaatttcatccaaatatcgttcaaagctagaaactgagtgaaataaacagggaagcacaacaacaacttctgcactttccaaattgacaatgagactcaacttcctcaaggagagacgtagtcagatcgcgaacgagctccaaaacatggacaaaggaaaaaccctagggcaacccagtccaacctcgggacaaaaccgtgtatcagaggaaactgaaaaaggatcagggtcgaaccaggatccagacagcagcaaactacagagccctcacattcttgacagaggaagatccgagaacggaggagacagaggcagaggatcatctggaggaaaccatcccaacactacaccaaggaccttctccagatgatactctttatcaacaaccccttccctcagatgtacagccgccatttaacaacaccacctccagttatgcttattcgtcacccccaacaaccaaataacagattctttcttctttttagtgtcattcttatcttgcttcagcatttttttaagaccaaataactacactctctttttttgttgtg

SEQ ID NO: 27717 - DNA, 731 bp, Arabidopsis thaliana
tgacatatctcgcatgcagctacatattcccgaacaatctggtgcattgacggccaataatattggtgtgcaaggcggcggtaagtttgcagaacccccgagtgaccaccaagaggagtgtcatggtgctcccttagtagctgcctaatgagcggtgacgacggtggtaccacgatcctgttgtggtaacagatgagaccattttttcactcatattggttccttggtttagctgtggcgagaccctattcgctgtaaataccagtctgtttcatacaactccttaatctcatcccaaagcgacgattgtggcacgaagatagcatctaaggtgggactaccgtgaacactggacaaagcatcagcggcggagttggtcttacccggcctataagtgatctcatagtcatagcctaccagcttccccatccatttctgttgttccggcgtgaggatgcgttgttccagcaagtgacggagactctgatgatccgtttgtattgtaaacctgcggccgatgatgtaaggacgccatgtgcgaaccgcaattacaatggctagtatttcccgtgcatacgttgaccaagactgctttgtgactcccaaggttctgctcatgaatgcaatgggtctcccattttgagacaagactggccccaattccttcacccgaagcatctgtttcgatcacaaaggatagtgagaagtcgggaagtgtcagtgttggtgtt

SEQ ID NO: 27718 - DNA, 1440 bp, Arabidopsis thaliana
taactctgttttttcctctgttttaaaattctgttttttcctctgttttgtttcttgaagaaaatgttctgttctgtttctcattgtttgtttctttcaggcaagagctggaatcagagagattcacttcctaccattcaatccagttgataagcgaaccgctttgacgtttatcgacagcaacggaaactggcaccgagtaagcaaaggagctcccgagcaggtaactaaaactgattttggttcttaagctaagttaagtgttgtgacttcttaaaaaaactgattctttgatgatttcagattcttgatctctgtaacgcgagacgtgatctgaggaagagagtccactctacaatcgataagtacgctgagcgtggacttaggtcattagctgtttcaagacaggtgagaagaaatcttacattttgtaacaagttataggaagaaggaaaaagagagagagagtttaatgtaaattttgtgtgtctatgtttcagactgtaccagagaaaacaaaagaaagctctggtagtccatgggaatttgttggtgtgttgcctctgtttgatcctccaagacatgatagtgccgaaaccattagaagagctctagacctcggtgtcaatgtcaagatgattactggtttatatctaaacattactcttcgctatagcgaaaacaccgaatttcttactaatgtttccaatggttttataggtgatcaacttgctattgcgaaagagacaggacgtagacttggaatgggatcaaacatgtacccatcctcttctttactcggtaaacacaaagacgaagccatggctcacattcctgttgaggatttgattgagaaagctgatggctttgctggagtcttcccaggtttgtttaagagccatttttgtttccacaaacacaaacttgctcttctctctgtaacatttggtctcttttttttctttaccaaattcattcagagcacaaatacgaaattgtgaagaagttgcaagaaaggaagcatatctgtggtatgactggagatggagtgaatgacgctccagcattgaagaaagcggatataggtatcgctgtggcggatgcaactgacgctgcacgaggtgcttctgatattgtcctcaccgagccaggtctcagtgtgatcatcagcgcggttctaaccagtagagccatcttccagagaatgaagaactacacagtgagtgttctcttaatcttaaaccataacctttttagaatctttacaccatgataacttgttctcatggtgtttttaaatgttcctttaaacagatatatgcagtctcaattaccattcgtatagtggtaagtaatcaatcttgtatgtattcttgaatatcatcaaataatctctttttctatatgactcctcactttgtgccttttcacagtttgggt

SEQ ID NO: 27719 - DNA, 740 bp, Arabidopsis thaliana
ctctgctttgtaagtcagttctcgtcttctttagcgatctactcgtctatagttcttcatggtccgaacatattcaacatgtaagtgaggtattttctcttctgcaacgacacaagctcgtagtgaagtataagagatgtgagtttgggcaaaaagaattggaatatcttggtcacatgatatctggtgatggagttaaggtggatcgcaccaagattgcaccaagatcccaccttggatgccatctttgtgccacagtcctcgttgtgggatgagattaaggcactgaacggaacagacccatatttactgtggattgggtctctcaccacagataaataagggcacccatatgagtggaagaatggcctcatctgctaccataactagatcgtggtaccaccgtcgtcaccgctcgttgggcagctgctaagagaacaccatgacactcctcttggtggtcactcggggaattctacgaacttaccgccgtctcgcacagcaatattactggccgtcgatgcataggattgttcgggaatacgtggctgcatgcgagatatgtcaaaaagctaagtattcttctctttatcaccagctagtcttttacagcccctaccagtgcctgctcaaggttggtgaggacatttcggtggacttcgtcacctgactgccacgatctgaatgacacaactcactcatggttgtggtggaccgtctgagtaagtctgcacacttga

SEQ ID NO: 27720 - DNA, 824 bp, Arabidopsis thaliana
atcatatgagttatttgctaacttgagtttgaaattcattattttctcagagttaataatttatactatttgcaatttgttcatagatcattatgaaaattaagagcgtgtgttgtgtatacctaaccccgtgacccgggccacaagcaagtttggtgatgaggaggttgcgggtaccagggccgatagcaacacaatcatctccggtctgaacggtgcttccggtgaatgtgaccccggtggagtgctgaacgtggaaaccgtcggtgtttgggctgtttccaggagccactagcttgacgttacggacgaccacattggtgcaaccattgagggtcatatgggtgacctggctgttcatggatttcactccacttatgatcacgtcttttgccgagttgaacgatattgactacagtaattaatatataaacgccatagattaataataagattataaatatttcattttattttgaccaaagaatccatttccttgtccaaaaatcattatcataatagttattatatgcttataaaataaattcctaaaaatggcatggatagatcatattgaaaattaaatgtgcctgaattaatatagttgaaaactatcaactaattccttttttttttaatcgtaagtaaatgattggaataaagatatgttatttgactattaaaaaaaatatattgacttatttagttattactaatcaataatgattaaagctatttgttgctcttttgcattctggtggcgcttatgtatgaatgtcagattgttgtttttatttacaataactatagatagaggagaagca

SEQ ID NO: 27721 - DNA, 1181 bp, Arabidopsis thaliana
ttctagtgttaacagtttcctctgggattactggttgcttaaggacttatagaaagatcttgtatgttgttgtttaattgtgaaagtggtttctgtatgtagattcacacaacaagccagtcttccccaatgcaagcatacaaccaggccatcaatgacttggacaaggagctcgactacttgaagaaccagtttgaggtacataagtttctctcttcggatatacttatctgattatgtggttaataagctagacgaatatcaaatgctattgatgttgtttgatgtacctggtcttatggtatacccttctgtgttttcaggcagaggtggccaagttttcgaatcagttttaaggaacttggagttctccatcagcacatcggggaaaacgttttacattgtcttttgctaagcaccaatcaagactaataatgagcttgggaaattttccctagttatgctttgtataaatcaaaaacaaatcggcctgtaacttcttttaactctatgtttcaacaccatttcaggatgctatgaagtaatgcttagattacctcttctttttaccattctatctacataaaccgcttaatgtttgaactattgtacaaagtctctttaagagttgtgatggtgaagctactactcttcccaagctactaagtaaagtgcatttgtacagatattcacagtatagtgaagtcatcatgaagcccttctagctgaccccgagtacgctgctgctgaataattaacattgatgtgttgtgtgagaaatctgatcctgaaagaacgtcacctatgggaccaagctctggacattgctgccagtcgttgaggccggtggttaacccactgctcgctcttccccctcctcttcctacaatcaccagcccatactctccatctagtgatttaagagctgtgaaagtctcagaggagttggtgagatgcttctccatgtaagacactcttccacctccagctatgtatctttcgtagaactcagcaaaacattcatcatcaagcttcatttcctcctcttgatctaccacactcgctctgttcaggatgctgcttcgtttttgtgcgttttgagagctcttgtcttccaagaaacgtataacctttaatttcacagcatttcctgcaacataacagaatggtttcgactctag

SEQ ID NO: 27722 - DNA, 688 bp, Arabidopsis thaliana
agctcgagaagttagggcagcttacagatttgttttgttcgaatatctcttgggttccgttgccatgatggacatcctgcaacggtagatataacattgatatgagccaaaccacacaatgcagagtacaacgaattaaaaaagtttgaagatctacaaaatcacccagtttagagttatcagtaacattacccagtccacaatcagcaccttctttgcccctgctgcttgtgctactaatgcagcaacggctgcattattgtgaaggcaaaaccccatagcatgcctgacgccagcatgatgaccgggaggtctaacctgatacaatcagagatttttttttttcaaactaatatggtgtaatttcaatttaaagcaattgtgtagttgcatctttaaatttaaaaattttggtgaattagacataccaaagcaaaacaccgttatacacggccagtgaaaatatctgtagctagatcagcgcacaaacctgctgcaagtctagcagcacgtgctgaatactcattagcatatgtgtcagaggtgaagtagctgccagacaatggtaaaagaacgggatcaagagcaaaaagagataaatgaggagcagcgaaggtaaaggaaatttcaattcaagtttgaacagtcagattaacaagcaaggatatgcacggtgaacgcaaaaaaa

SEQ ID NO: 27723 - DNA, 426 bp, Arabidopsis thaliana
gggtcacgtcgacgtcactctggaagttgaacgtgcctgaagagttctcgatggagctatatgcttgttcgatagtgttgctggtgttgagcctcagtctgagactgtgtggagacaagctgataaatatggtgtgcctaggattcgctttgtgaacaagatggacaggcttggagctaagtttctcaggactagggacatgagtgtcaccaatttgagtgctaagccgcttgtgcttcagataccaattggtgctgaagatgtctgtaaaggtgttgtcgatcttgtgaggatgaaagctatagtatggtcaggagaagagcttggtgcaaagttcagttacgaggatattccataagatcttgaagatgtggctcaatagtatcgatcggcgatgatggaattgattgttgattttgatgatga

SEQ ID NO: 27724 - DNA, 490 bp, Arabidopsis thaliana
tttctgatgttatatagccgaggcgaacgggctgtaccgcttaaagattaccgaaacatcggtattatggctcacatagacgcgggaaagacgacaacaaccgagaggattctttactaccacaggaagaaactacaaaatcggtgaagtgcatgtagggactgctaccatggattggatggtacaagagcaagtacgaggaatcaccattacttcagctgcaaccacaacgtgtttgggatacacacaggctcgatattagtgctacagcgggtcacgtcgagttcactctggaagttgatcgtgctgtaagagttctcgacggagccatatgcttgttcgacagtgttgctggtgctgagcctcagtctgagactgtgcagagacaagctgataactttggtgtgcctaggatttgccttgttaaccagatggacaggcttggaccgaactttttcaggactagggacacgagtgtgaccaatttggg

SEQ ID NO: 27725 - DNA, 901 bp, Arabidopsis thaliana
caagctaatcgattctgctaaaggatggattttcggttaacttcaaattggttttgccaaccggagaaaccaaagagcggcgagagaatgtgaacctgttagaaaggaacaagtgggtggagattccggccggtgagttcatgatatcaccagaacatctctctggcaagattgagttttcgatgttggaggttaaaagtgaccagtggaagtctggtcttattgtgaaaggtgttgctattagacccaagaattagaaaatccaaacttgtaagcttaaacaataataagaacacgaaatttattatgatgatgatttatgtacacgaggcatgagatttatttgctatatacagacacaaagacacacttgacgacacattacaaagggaagatgcgtttttatgcatcaacagagacacttacagcattgagctctacatgttgtctaccatcgctttgtggttggacggttaaggttgcacgagcttcagcttgagggttttgatcatctccaggttgagagactgatatggagttcacgggttgacccggttgtgccgatattgttgtcatctgatatgatgtcccacgattctttcacggaagcaacctcgagtccattctcatggaatttctcaaattcatatgtggtgggaaggatgacataatcgtttactgggttgtagaacgggtctggttcgcctacatttagccattttttgagcattcggaagacacggtgatcgttgaggatcctcggtgctcccagggactccaactcttgctactgcttcaagccatccgcctagaaaagaaacaaccgaagaaccgttacaaagagaaatgatcaactaactgatcgaattcaagatttctttccttgtgatgagtttatata

SEQ ID NO: 27726 - DNA, 668 bp, Arabidopsis thaliana
tgtgtccaatagaaccccaagcaagaacatcaacaatgttgaatccaattggatcgttcgatttcaagagactgacgtactccttagcacgatcatctccagcttcgaaatgggtttttccgttctgctccggtaagccctgttttgctacgttctctctctggaagttgaagaagacgaaacggccgaggaagagggagagacctgtgctgagacttatgacgatggaagggcttagctcagctctcacgacagcggaggaggattttctcccggtggttgatagtttgggtagggcggaggaggagccacctagacggaggggacgaaggccatggaatgagatggagttagggtttttgtgggagattgcagtggagaatgtggttggtgagagcaaagctgatgcgcttgtggccattttgcttcttcttcttcttctctaagaaaaatttcagtaatagaaaaatgagtggttttggatttatgatctgaaggtttggttttggattctggcaagcaggagaagaagcagaagaagattttgtttgtgaggatacgattacggatggatgatgtggcattctctcgttggttctttctggattatgagattttcaaagaaatatttgcgttcaaacccttgtaatttagtaggatacactttg

SEQ ID NO: 27727 - DNA, 762 bp, Arabidopsis thaliana
atccccgctgcagcctcctttttagctaaagatttctccacaaccaggctttgagctccatcagaactgacatctccacaattttcatctactgctacattctccttcacttctgcagagtgaatccatatatctttcttcacagtattgtttgctttggcgccatcttcttttttagaaactttcgcctttttgacactaggtgtttgaagcctattttcttctacagtggcctgctttctgcgtttacctttctttgtatcaacctctaattgcgctgcagcatagcttggatctttagtggcagcttcctttcttgttaatgtttcccccgcaacaaggctttggtctccaccagaactgaccttcccattttcatgttccaatgctaagttctccttcccatccgcagagttatcccctccatctttcatcagagtaccatttgctttgatatcattttcttttctagatattttggtcttcttgactctggattttcctactttggctgtaaaagaacttcctttcttccctctttgaaggctatttttacctacaccagcctcccttttgcgtttacttgtattcttatcaacctcggattgtaatgcaccatcacttggatcttcagttggaacatcattaagctcccgttctagcaccgtaatttccacctctgcatcagctgcctctggggtcttagcctgcagcttatcttggttcaccatcagatccaacacaagatggtctggggatcct

SEQ ID NO: 27728 - DNA, 592 bp, Arabidopsis thaliana
actacttctatctttggatcccggctattcagaattggattcagtatgagggagacgtttttagattccctcggtgggtggaactcagttccctcaaggtgctgataagtatatcgatcagcttgcttccgtgatacctatggagaacggaactgttaggactgctttggacactggttgtggggtaatgttttatactttcttgactttcttattgaaactacaatacttacatggtggaactaaattgagacgttttgttaggttgcaagttggggagcgtacttatggagcagaaatgtgcgtgcaatgtcttttgcaccaagagattcacacgaggctcaggtccagtttgctctcgagagaggtgttcccgctgttattggtgttcttggtaccataaagttgccatacccaacacgtgctttcgacatggctcattgctctcggtgtttgattccatggggagcaaatggttaaaaccttttctgatcttatatcaatttgactttcactttgtctaaagacatatcagttacttacaatgctgtttttcttttataacagatgggatgtacttgatggaagttga

SEQ ID NO: 27729 - DNA, 605 bp, Arabidopsis thaliana
tagaaactctgttggattgactcagcaagagattcttcaattacctactggtcctagacaacgttccgaggaggaaatgcaacctggtcgtttaggcggtgggttttcatcttatggtggtcgttctggtggaagaattgggagagatcgagatgattctgatggctcttggagtggtggtggtggtggtggtggaaggagaccttatggtggtggatttgatgatgataggagggggaatcagtctagggtttcggattttcctcaacgttctagagctgatgaggttgatgattgggggaaagagaagaaaccacttccttcttttgatcaaggacgacaaggtcgttacagtggcgatggtggtggttttggaggtggtggaagtggttttggaggcggtggtggtggtggaggtggagggttatctagagctgatgatgttgataattggggtgcagggaaaaggcaagcaccggttagatcatctacgtttgggtcgagttttggtgattcagggtcagaagaacgtcgtcgtttggttttggaccaagaaaggttgagtcaggaggaagtgagacttcacctgttgttgagaagacgag

SEQ ID NO: 27730 - DNA, 997 bp, Arabidopsis thaliana
gtcaataaaaattgtgaaaaatcaatgtgtgattccaacctacccttttttcatagagggttttctttctaacttataacggaagtgcttgccccaaaagtaaaagaaattttgagttttggcgccttttattagatattaaaatcctctaaaaaaatgattgattcattgatatttttttttttcatcgagattcagttgaaatggcgatggttttttcttgttcctgaacgggcttcttcctttttttattccattttttaggtttatgctctaccccgagtaaaaggaaaaatttgcccgattttgatttgcacatataggacaaatgaaccaaataccgcgtctttttttactactccttcttttttttcaattcagttctttcacttgtcttctgtcaaatagtcaacaaattttgaattatattatatattatttgtatttgatttgagcaacagttttagatcgccctgtttcaattttttttatagagtttttatcataattttgcatataatagaagtagtaattataaaaatattatatattaattatcaattgggtttttgctaaacggagcctggatacttcattttattagtccgatcacgtaaaccataaaaaaattttgataatctaatatcaatctaaatactccctgcatttaattccactttattttttgcgcttcgcgttacaaatttttgataattcaatcaatctttttgagcgaaacagaggatatctcgatcgagggagaaaatggggaaatccatatagcccgatatatctgacaagtcgcactatatgtcaacccaagatgtatctccttctccaggacttcgaaaaggtacttttggaacgccaataggcatgaaatgaaaaaaaaagagaatgaagttctctatttcactttgatgtggaaacgtaaaattggggtttcgttttctaatctattatcgttttttctactttattaatatatttaaataat

SEQ ID NO: 27731 - DNA, 845 bp, Arabidopsis thaliana
ggtcgactctataccattttcatttgaaaaaaaaaagatatgtaatgagatttttcttttaattttttaatgttatgtaaagctcacccatataattctcactcatgatctttgtttctttaagcttttcttctccattgtctctctctttcttatcctctctttctcaatcaattccttcagacttatacactttattttttttcccctcttgtcgaaaacatcacatataaataaaaaaccaaaaaccctaatttataaaatatatataaaatagttatagctccccacttatatatgcaaaagccaacatcaagtatcttaaatgtcataatggacggtggagacagcgtcggaggaggaggaggagatgatcaccaccgtcacctccaccatcaccaccgccctactttcccttttcaactactcggaaaacacgaccccgacgacaaccatcaacaacaaccttccccttcctcctcctcctctctattttctctccatcaacaccaacaattatctcaatcgcaacctcaatcgcaatcgcaaaagtcacaaccgcagacaacgcaaaaagagttattacaaacgcaagaggaatctgcggtggtggcagctaaaaagccaccgttgaaacgagcgtcgacgaaagaccgacacacgaaagtagacggaagagggaggagaataaggatgccggcgttatgtgcagctagggtttttcgagtaacgcgagagctaggtcataaatccgacggtgagacaatagagtggcttcttcaacaagctgaaccatctgtaatcgccgccaccggaaccggaacaatcccggcgaatttcacttc

SEQ ID NO: 27732 - DNA, 1346 bp, Arabidopsis thaliana
atcttttgtggaatgacgagcacgaaccatcgcctgcatcttgacaatagcttggacacaacgcagtgatcccatggcctgactcctaaccaggtggccacgaactgcagcttggagtttaataactttcttgctccttaaaagttctcttcgcgcctgcagtttaacaacactccagtaagaatagttttcaagacagatcctcagcaacaggttgggaaaatgttaagatctttaacaagttcacagagttaaagaaagcttcttcacatcctaaataatcttactatataagaagagacagaagaacataccaaaaaaccacgaacagcagcttggatgacaacgataacagactcatccagcttctcatcaactttttcatcactttcttttctaactataatcacatcatcggattcagattcttccggctcaaccttactagccatttcaacctcggaagtaacatcttcctctatcttggctgcatcagcagcacttggtccttgcaattcagttccaatcaaatcatcttcctcagtttcagtcccttttgattccacaataacaggcgacacctcagttctatggtcaatctgttcctccactgacaacaactccgtcttctcctcaataacagactgtgtttttttctcatccacaggctcagccacataggtaacaacaggtaactgactcttcttttcatcaacagagaaagactgctgctgtttttcagaaacattgttattatcaggagacggagatttaaggagagcagattcaagagtctctctagtcctagaagcaggagtagtttcagaaactacactagtaatcaaccctcgctgtttcccagatttcttcctgaaactccatccacgcttatccccagagctcttgttctacatccaaaaaacaaaatcgattccaccaaaatattcacatttcttaatagagaggcctaaagacacaaaaccatcaaacctaacagatctcgtatacagtaccagacaaaacaaaagccctaagtaatttccaaaccaaacaattaaaaaccctaagatttagacaaaattagaaactaagtaatgccaaaatccgacaagacactaatatcagatcttaaaatagaaacttcgagcagagacaaatccgaaacagaaattgaagatcgcgagaacattacaaagagggagagaaaatgtcaaaacctcgagggcggtggagttaggatcggcggaggtatcatcaccgccggagcaagagatgagacggagacaagaagaagctggagatcttcccatgactggttcttacaagaagaagaagaagaagaagaa

SEQ ID NO: 27733 - DNA, 935 bp, Arabidopsis thaliana
accactggcagttttgcggcttggtttgtcagaggaagttcagcgtgtgctacgtgtgataaagtggatagaaccgctgggctaatgctagcttctgtgcggaatgaaaccgtggggagttctcggggaagcggatgattcttcaagaattcttttcttctctcgtatgttaaatcttccaatgcttgaatgtcacccttcacaatgttccaaggaattcatcagaaagatcagcagagcaatagaatccagaaacaaaataagttttggtttatccctagtttctcggtccacctaactaaggattttaacaggcaatcacaagaagctgatataatgcaactgaaatgactttgttagatcaggaatgttgcaaacctttatgactttggagattagaatctccatcatctttctcaaattgacgtaatcacctagttgtccttcacggaggatatctgtagctattgggcttccaccatatggactctgcgccagtaccaacccagcgaccttatcctttagttcaggccagtatagtgataaagcagcagctgcatctatgcctcctttgctatgcccaagaagtagaacccgcttattagatccccaacagagttcctctatgtattcctttatctctctcgcatttttctcaaccgaggactgatatataaacatttctccatatattagtatgctatacaccaaatgtaactgtactaagttgagttagttatgattacctcgctgtgaatcttcgcaatatgacacgccaaacccatctttgagaatttcgttttcgtatccacaaaatatagaggtccatgattgctgaaaagacctacgaaaaattcaactaattttgagagtcctaatatacagtaatgtagtttaagtggctggcagcaaagaatcagaattgctacctggaa

SEQ ID NO: 27734 - DNA, 663 bp, Arabidopsis thaliana
caatacttgcccaagagacgttctcaaactttcgacatgctcgaatgttctcaacctcatcaacttgaagctcggggcaccagctatgaggccttgttgctctattctctttggtctaattgatctcgatgttgctgtttgcctttgcaccgcgctcaagctcagccttcttggcatcaccatcgacactcctattcaccttaacttggctcttaacgcctgtggaggtacccttcctgatggattccgttgcccaacatagctacaatatattcatattttctatctatgttcttgaattggttttgtctaacatccaaatttcaaacctaaattcatgtataagcaaataacaagtaaaattaagacttttatgatgatgcgatatatatacatacatacagtattgtacttttttatacacactagacataatcgtttatagggaaatactgttaagggaacaaatcaaaactatatatatacttataattgtttgcacacaaaaaaaaacttcaagtacttgtctgaactcactacctaaacttttctaatataattttcaaaagaatatactcacatctaatatataattatcatagtcacataaattaaaaacttaactttagtttataaaattacaaaataaataatgtttgaaaa

SEQ ID NO: 27735 - DNA, 992 bp, Arabidopsis thaliana
ctgacaagggtttctctttggtcaccatagccggtgatggagataggaccagagtagcctagttcattgaacgccgcttctatgctcggacggaccagacgagcatcataaccctctggaatcggacagtccttcatgtcccaccacacagctattttagctctcgcgtactcaggcttcgcgctcccggcgtatacatcctctcaacctaaactaaattcacagacacaagagtcaatgatttttacaaagaaacctaacttattcaacaagatatgtttcttgaagaaattagggttttacctgctaacgctaaatcccgctttcgtgatgaagaagggactcgagaaaatcaagtggtacaatggcggtttaagaggggtaaatttaagcccacttatttattgggcctgaggagactaaagcccattaaatattcatatataagtccagagattctcttccttcaaacatgtaaagaaagatcgtgtagctgttttgtgtttcgttacaacttacaagaagtctatgtattttagtttggacacgatggtggtttgatttaggaaaacgaatctgaagtacaaaataaaacagattcttctctgtttagtttatcattacatagaagatctatggaccaaacgacgtccaccaccatttaaaccacaaaggagactagcttgtggtcgtttagattttccttgaccgttactaacaccgtcaacgaccttttgaacattggaggtaaaatcatgtacgggagtgactgtcagagaagcggagtcgccggtacgagcatcaagccaattgacaatgtcagcaaaaacgaggtcaacgttagcatcaggctcaccagaagttaatccatgccacattcctgggtaaagtttaatggttttgtcgcgtgtgcttgccttctcgaacaaggctttgcttatctctggatcagtcacaatgtctgcttcaccgtgaaggacaaagaaaggcag

SEQ ID NO: 27736 - DNA, 681 bp, Arabidopsis thaliana
tcgacggcatctccgtcatctttcaagatatccgaacttacttcgctagacactatgttctcttctacagtgtcttctgcagtagggttgattaacccttcttcagtgtctaaagctactgaaggagaaggacttggatgcgggcttgtttcaaattgggaattcttctcatcatcaatcttcggcagatcatcagcattggtcacctcctcaagggaagctagggaagtaccttcttcaataacaatgagacatggagaatcttcatgttccctgacaggagcttcctctcctactctctctccagaattctcattctccgtttcctttacatcatcctgccttttctctccacttccaatttccttatcggtaccctgttcaactctctcactctccatttccgttaaactctccatcgttgattctatttccgtcaaattctccattgttgattccaattaaacagcattcctacacaaattcacaaatacaagaaatatatataaacatatcaatcaggaattgcagaaaacaattaaaataaccagaggtttcatagaagctcctcacaaattagacaaaccacaaacacacatataaagtgtgggaaggagaacagctcaaaggttatttaatcactggttgtgtgaaagccctaggactttgggagagttacgt

SEQ ID NO: 27737 - DNA, 630 bp, Arabidopsis thaliana
tcggccgtccatagaatctccaacgatccgagccgcacgatcacggttcgttaaaggaatagagagaaaaacataactaatcttctaataaaaattaatcaacaataaaagaaaaaaaaagaagcaaattaagtagtcttataaatataaaatctaccgtttgtaataatttttttgttatcgtgtgattcaaacctgatagtaaattagtaagaaataaaacaaaaagatagaaacaaatacagtaatttgaagtctcaagacgaaagtagaaataaaacaatttggtttatcaatcgatttttgttgcgagtttttgttgcctctcttgctcaacttggacaagcaaagttaagagcgcttcacaaacttgagcagcatcagcttctaaaggaacctcgttcaaggaagagtacaccatccaggcatggtctagtttacgtttgggtctaacaaccacagaaccaggaacctctgcgtcacagcaagtcactagcccgtcactcttttcaccgtatctgacttgaagtagctgagcgcaacgagccattgcagcaccaagtggcattaccactggcagttttgcggcttggtttgtcagaggaagttcacgtgtctacgtgtgataaa

SEQ ID NO: 27738 - DNA, 937 bp, Arabidopsis thaliana
agctttttggtgctttacttgattcatcactctgtgttcgttaatagattatataatctttgaattgtcgattcgattccttagagaatttcacgaagcttggatttttacttaaaaccttaatttagcaactctggctaattatccattgacctagtctaacgttgaccaaccactgttccatggatttttttagtctttaaaatagtaaattacaaatagaacattggttttgtcgtccatgtgattgtggttgatttgattatgtctactaaatagcttatatgaaaagttttgttgttcgtcttctcaaggctaaatgctctgagattggaagagaaagaaaaggaagagaaagaaatggttcaacaaattctagaagcagcagagcaatataaggctgagttctatagcaagcgtaacgttactattgaaaacaacaagaaactaaaccgcgagaaagagaaggtaatttgtctatatagtaaatctcaccattctatcaagaaactctgaattctcaggcttatcattcgagatttgtgtttgttattggcagttttttttggagaatcaagaaaagttttacgctgaagctgacaaaaacaattggaaggcgattgcagaactcattcctcgtgaagtgccagttatagagaatagagggaacaagaagaaaacagcaaccataactgtaatccagggaccaaagccagggaagcccactgatctgtctcgtatgcgtcaagtgctcacgaaactcaagcacaatccgccaactcatatgaagccaaaactgccctcaccatctggagctgacccgaatgtgagtgtgagtgaacaggtcacagttacagagaagttgtagttgtgtatgtgacaagttaacttcttcttgattgatgttaaaccgtctttactttgttagcttccctca

SEQ ID NO: 27739 - DNA, 668 bp, Arabidopsis thaliana
ggctaatatcaattatcccttaatggcagagtcgacggctctcctccttgccatccaacacgcttcagaccttggcctaaaaaaacttgctatagtttcagactcgcagcagctagtcaaagcactgaatggtgggtctcctcctttggagctccatgggattatcttcgacatctcagttctctccctaaactttgatgaaatttcattttcctttgttaagagagagaataactttaaagctgatgcattagctaaagctgctttgaatcctatttactctatacggttcacaattaatgaaaaccaaccatttaacaaaaaaggagtttacaaataaaatcaaagagagagctgaatagaagcttgacccaaaaactaatccccaacatcttactatttgtatatatggaattcgttttgtgaacaatgttttaaaaacttattaatttagctgaaacaatgctcaattttgcttcggtgaaatatataaccagcttttgttggcttctcaataaatcgtaaacttttgttaattttttttgtcggcttagtgatttcttatttaatcttaacttttgttgtctttgctgaattaagatgataaatttcgaacaaaacttttattggatatgattaatttgagcctccagtcaaatggattttat

SEQ ID NO: 27740 - DNA, 2100 bp, Arabidopsis thaliana
aaattgatttcaaaatctctaaattccaaaaaaacaaatccttaattcctaaattccaaaaatcaaatccctaaattctaaaaaccaaatccctaacagcctcttattttcagcaattggtcgtcgtaatagtcatcgtcgtaaagatcctcaagagagctaaagaagggccttcgctttgatgtttcctccttgttcatcatcgatcttgttcctcccccttcgtgaattcaaacgaacaactgctgtcaatagtcgaatgttattattcatattcaaattggttctcatgtgtgtgtgttcgtaacattttattcacaagacaacaaaacaaaaacagggaaacttccaacatgatgaaataagattatgagagtgagaaaagaaccttggacaacgggattgagattcctaaagaagaacatgatgttgccatgtgaagcagatggattgaagaaaaatgaattggattccattttggaatttagggattttgaaatcaatttgggaattttgattttttgatttcaatgaaatgacgtcgttttgagtattacaggaaactaattaacgtgtggtaacggaattaacgtatccgttagaaaaagataacggtatggggattttggcctggtcaacaataacatttgtgtgaaacgaccggtcaacatttttattatgttttatttggccacacaaaaaattcacgtattaaatggtcactttttgaaagtttacgtataaaacgacatttttcccgtaataccgtatacgctgcattgaaacattccagtcctagtcacgtgcacggtgcacctactagcccacgactcccacactatccgccacgtcagaaaacgaaaccggttgtagcaggtaaaaggcacacaaagctaagcataaggaagcgcgcgacacgcaccggttcagccggtactctgcgtcgataaacgacatgcaagaccgtccattttcttaaaaaagcgatcttgatctgacggtccttatttgtttattcaaccggtaaaatacaaaaaaatcaggaaaaggatcgtggatcgtcaatggcggactggagtaaatttctttgacaataaccagtcctaaatcaaggtagaatattgcaaaaatgttcaatggaagaagatagattggtgaccatgattatcaacgacgtctaagctgtttctgcgtcatttggtaagtgaagcttttgtctctttcgatttctctaatgcaaaaaaaaagggagaaagattttgattcgttattgaaattattctctttgagttattttaattagaaagaagtaatttttatatatatttgtcaagaaaaaaagtgagcttgaagttcacgcttgtaaaggtgtcagttttgcagctcattatcgccatgttcttctctctcgcgctctttgtgttttcttctctttgctcataagaacccactttaatgtatgttcaggtcttcttcttcttcgtcttgttgctctgaagagttggtcctgacttgggatttagggatttcgttttgataatggaggagatgcgaagaggagtgcctacgtggcaagacgagttagctagtctcatggacggaggtttacaatacgacggatctccgattgatttgacggcggatactgaatcgaggtcaaagagttcgggtttcgagtcgggttctggatccgaatcagtggagagtttgaaagatcaagtgacggggtttatgaagtcttggggagaaatgcttatggatctcgcaatcggatgcaaagacgttgtgcagcagatggtggtgaccgacgactctatcgttgtaaggaagctccggaaaccagctgctaaggtttcgaagaagcttagcttccttaacgagtacttgcctgaggatcgtgatcctgttcatgcttggactgtgattttattcgtcttcctcctagctctcacaggtatattatcaaacagttttctggttttggatcccattatgtatctgcaatgccacactcttataatgaacagttattcaaaatgtctgctagaaaactgtgtattgggatgaccttatagaatttattgaggttgttgtatgtag

SEQ ID NO: 27741 - DNA, 575 bp, Arabidopsis thaliana
tcgtaagctaaagccgcatcttccgccgtctcaaacgtccctaaccaaaccctagctccattcttcgccggatcacgtatctccgccgcgaatttcccccacggtctctgcctcactcctctgtaatgcttcgccttcactgccgtctccgtaaccggtaacgctttctttggtttctcctccatcgccgtaaagttctcagttggctcgactttaaccgccggaaaatcaaaaagacagctcaagtccgatgatgacgtgtcaaaatggaaggcatctttgaggagtccgtacaccaacatgtcctctgaatcattctctttcaatggcaaacctccccaactctctgtgaaacacgaactcggtgttgactcattgagtcgcagctcgttctctcctcctcctcctagcaagtgacgtgttatcgactccaacaaagcgtagtcggattctatattgcactgtccgtacattttcagagaaactaactatagagttttttttgttttgttgattgatttatcaaatatctgaacttttttctatgtggaaggtggttaagaggtttatataga

SEQ ID NO: 27742 - DNA, 2003 bp, Arabidopsis thaliana columbia
agtcatactttgggttccaaagcccatgtgacggcttgcaagtgacaagacgtcgaagtccatctcctctagcccatgttctacacgaacgcactgataatgccagtccatgacctgtccagtcaacactgccggcgttttcctgctcagctgcagatgatgcccctgccgagctgcacattgattcaattgaatacaatcgtcgatatccaaaagagcaaaacttacagaaaactaaaagcaccgcaagcaaaattaagatgcaaatctcaaacaacgaaccctagatatatctcgtctcagctcaaattcaacaaatcgaattcaaactaactcataatttcacacttctgaaactcgatctgcgtttaaaatggggacgaacctagcagcagcagtttgaggaggagaaggcgatctagcacgtcgtcggaacctatcaacgggagtagcagaggcggaagagaagctgaggctacactgttccgattacttctagggtttacgttctgcgagctcacatcctcttccttcatcctccttcgtcaacgacacacactctctctctatatcgggccttcttcactttttcaacagagagtaggcaatagaaagagaaatcttgaggtctcaaatgacaaatctctctcttgacgttatttaatatttattaaatttagtattaaatgctctgttacttatcgataatattaaatacttttaatttgttaatgacgaatttgcccctatatttacaatatacggcttaaatgtagccacgtgtgtctatcacgcagaagtttccgggtctgattttataaatgggctttagagacgagcccaatagccttacttttcagacaaacaaaagtgttttttttttttgttagctaaaatatttatggattttaattttaattttgtaagttggccttatcggaaatccgcgaaaattccaggcatagaagcagccacacccacacaagctcaagttcaaagttatctccgcactctcttcttcttcttcctccttcacttatcttcttcttcctctctctctttctctcaccatatatctaaattgctcatcgattctcaattcagcttcatgctttcggatttgattcgtcgataaccccaatttctttacaaagttgaagtttttatgtcatttctggttcgaaattcgttgcaattggaatgagataaagtctctgaatttgctatcgctttgttttattcgttttctgttttttttgagatgccatcgatgcttgttctcgtcggcacaatgccgtccttggcttctctggttagtctaggtggtgcttgtgcaagcgtttctggaacgagttcttcggatgcatcgtatgctttagttaagagggtttctttgtcaaggagaagtgttaaggggactaagaaatggctgtgtagatattctgtttcgtcttcaactactactactactgctgacttcattgctgaccaaaacaacaactcagtttctatagattctaactcgtttagggggagtaaagatggggatgatagtgaggttgtgctgaagcagactcctaaacctgtcttgaaaccccctgtggcaagggtagaaagaggtttgggggtgaatactgctccttggagtaaagatttgtcgaatgggggtaagtttgatggagaagaagagaggaataaggttattgaatctcttggtgaagttttagataaagctgagaagttggaaattccgaaaccgggtaacaaagagggtggtgaggctgttaagcgtcacagcctagtgccaacagtagtaactcaagaaatggtagctatgcgaatgcgagtgatggaggaacaaggaagacgaaaacgatgaagagtgtgtggcgtaaaggcgatgctgttgctgctgtgcaaaaagttgtttaagaatcacctaaaatttttaatagaggagtgcagaccgaacctaagacgagagaagagggagaggtgaatgc

SEQ ID NO: 27743 - DNA, 743 bp, Arabidopsis thaliana columbia
gaactgcatctcctcaatctctctcagtaatctcaccctcctccttcaattccagattatcccgtgtcaattcttgcttcttcttctccaattccttgaaatagaattctatttcaattcaccagaaaaaaatgatttagggttttaagttttaacttttagtgaagaagtcgttccgagggtagttgacacttgacaatattgccgcgaatccttttttgtacggacctcttagtgtttaatgggttcaggcccagttatgttaagcccaattataacataactaaggcaatcaaaaaacatgtggaatcgtaatcttttaggcttttagccatacaggatgtgattagttataatctatcaatggtttttattttaaattttggtttggtaaaggatgttgaagttaacattattgattacaacttcgtactatacgatgttcaaccttaaattcatctttgtaatgtaatttggatagagagtagatagggttggtaagaaaattatatcttccccgactttccgctatgtgtggagtaaatagttccatagagttcgatatagctgcattgttgtgggtcagaaattacgttataatgaatactaaaactgatattgttttttttctagcggcaaatgtgtttaaatttctgtgtagatgctagctctagtacttacacgactaaaaagatttgtcttgtatatgtatgtacaaggaatatacatgaactctattgttg

SEQ ID NO: 27744 - DNA, 555 bp, Arabidopsis thaliana columbia
aataggtttttaagtcaattatcctaaaacaccaatcatatcgttgtagtattttaggttgtcaatccaaatgggtgtgatgctaataatcaagatgtgatcagaagtcactaagtcaagccaagcataacaggttttggtgtgttctagcagttctaagtgaacatgtagaaaacaaaaaatcaaacagaaacagtaaaacactcgaccaacacagctctttgcagagcactgggtgaggtcgagtgacaggtcgagtaacagacagaaaatgaaacagggatactcgactgcacagtctgttgccagacaactgggtggtcgagtaccaggtcgagtaacagtaatgaattgcagaaactaagcaacagatgacaggatgcagtaaacagcagtagagtaaacaataaaatcaatcagacaaagaattcctaaggatggggtaattgagtaatttcgtttcctcagtttacaggtgattgacatgctcaataaattaaccctagacaacaagttcatcaaacaaatctaagtgccaccgcaacagagactctc

SEQ ID NO: 27745 - DNA, 589 bp, Arabidopsis thaliana columbia
attttcttaaatttaagcaatgctcgtttgattgttattttatttaatttaataaaagtttaagttgttgtaatttttttttactttgaatatctatttaacttgaattttacttaactattttgttctctaacttccactctctcaattattttgtaattcttcttacttctctctacaatttctgaacacatgtaagtttttttttatatatgtttatgttaggttttggggtatggaatgtatctcttagcttagatggttctgacgaggtgtgtcctgttgtattttgaatatgaagattttgtacatgttacgttggttatctatagatatccgaaaacatattgcgagggatttgcgaggacttgcgaggaacagcgctattttgctacgaatttgcgagagagaagttcaactacaacccaaagtaggaagattatttaaaacgtgctgacctaacctgcctaggactcgcaactccgacgcaaaatatgctacagaaagtttgtacgccgcaagtttaccgcagtttgcgaggctcttatcgtacaacaaatccctcgcaatttgcgatgactttgcgagg

SEQ ID NO: 27746 - DNA, 591 bp, Arabidopsis thaliana columbia
aattgctatcaagtaacgtcctgccaaactcgttcagccaacccgtcctgtcgagatattcatctatcttattaatgttgatcatatgcaggatatgttcataaattattgtctcatcatcggataattttgtagtaattaaatgctcgattaaatatctttccggtttgactactataattgaattgttatagtcatgcagaaaagcaacataaaaattaaaattttgtaataattagatgatattaaatattttgaaagttttattttttttgaatatttttggagttgttaaatatttttttgactgacgtttttttacaattgaggacaatcgttccacgtctctctcttctctctccttaagaaaaaaaaaacagatctactttcgcttttcttttttgcttttagatcttcgttgtaggtcagggttcttgctccatgaaacggtggtgagcgagctctcctctccgatagctgtggtgtggagttccggttcgtgatgcatctatggcttcctctacgacaagtttgaggagtttccgatgctattttttctggtcatggacgccagaattatagtggtggaga

SEQ ID NO: 27747 - DNA, 513 bp, Arabidopsis thaliana columbia
gataagttaggcatcaacaattaaaatataatttggttgagcatatatgaacagaatttgggaacaatcaagtttaaactattaagttttatgtcatgtatgttataaattgtatgttatgtatgtttctaatttatcatttggaataattattaagtcttctaaatttataaatatttaaaaaaaaaatatttttccaaaccccacccaactaagaacctaccattggacacacaaaaaatttatattcattacaccatctcttaagtctatcttattcaattttcatattaaatcaatacttaagaacacaaaattaagaacccaacgttagacatgctctaatgtaccttagatgaatccaacgaatatgtgaaaatttgatgaattcaaagagttcggtgatggaaaatactctatgaaccttgagagtaccataatgtatcaaaaacaaaatttgattaaattttataagtaattctttgaactttattttctcaatttacaatatat

SEQ ID NO: 27748 - DNA, 569 bp, Arabidopsis thaliana columbia
tttactcttctaagtaaccagtgtttagcataagagtaagtatggtttaaaggttccgtgaaccatctatataaaatgtgcagagaaatggggttgggatcatatagattcagggttgctaagggaaagtaggaggagctccatcatcaaaatgctcaggtttctatgcaattccagcagaaatataaatgtaaagacagttccaaataatctcatcatataagaaatggatggagaaatgagaagtgatcgaacataccactcccggtagctttcacgatggcgttactgataagaggcactttagaacacatggcagcaacaacctgcatgctccttggaggagacctataatcaaaatcttatacgcatatacattttcgatatactaaaatacttccaaacaacaacaacacaaaactagcaaattaatatgttcaaaacacgcaaaatccatgagcataaaacattttaatgtaggaagaggaacttactgagggaggagtttcctctaaggttggataatgtaactttggaatgataagagagtgcctgaaacacacacaaaa

SEQ ID NO: 27749 - DNA, 307 bp, Arabidopsis thaliana columbia
cattggtaaaaaaatgtcctagaaaaataatatgacttgtatgttttgaggggaatcttctgttccgaaaacttgtttaaatttattttggttgacaatttggttagagtaaaaacagcctattcagataaactgaatcatgtgatttggtataataagcatgttataagttcgtaaactctacaaaaatagttagtctctagttgagttccaccgaataaaataacgtgtctaataagactccaagttcacatgatcatatatatatatatatatatatatatatatatatatatatatatatata

SEQ ID NO: 27750 - DNA, 734 bp, Arabidopsis thaliana columbia
ttttccatcattaggaatcaccgccacgtcagcctctacctttctttcgatgttcatctccgttggtgccatctcaaaagaagcttagtctctttagataagttttaaaagataagaactttttttttggttgcggttataagatatgtcgatggtgatattatataaaggagagaaagaggaagttgaattaattatggttttgattttgaatatcttaggggattttcttatggaaaacgttttttgattgtgattgacccgattcttgtttgccaagatttagaatcggataaagatattaaatctagaatcgtaaataatatggaaattgaaatattaattggtgtgataaatgttgatgtatatggtacataccatgttcttgtaagtcttttgtgtatggaatatttatttagttcaacgtggccctattattatatcggttttatcctaagttggacgttttcaagataccgttaattcatccgaatattttgtagattggagtttcctactactaattttttttctttattttttgaatatcaggaggttttggaccgaagcccgtaatttttccaggcccgaaaccacatcatgtaatattagtttcatcccaaacatcattcgaaccggcgacctctaacgttcgccaaaggtctttaccaattgagctaatgccagtcgaaaaaccaaattaggtattaagtttggtaaattcaggtcaatta

SEQ ID NO: 27751 - DNA, 706 bp, Arabidopsis thaliana columbia
atccccaatcatcgaactaatggtacaagttacaaaccctagatttctgtaaactaagggttcaggtttctcgagagtgagaagatttcgagagtgaggatctctgttttcgaagctaccggtgggcgcgaatatatatatcggagtctatcgaagtatttcacccgagtgggtggatagaaaaggcggtgagagtctccgacgttgaaggaggccaacgatggagaaaagggaggcggtgaaaaacaagtgtttgttgttttatcagatttcaaataaaaagcgtgttgttttcaagttttacttaaatccataaacatcgcgtcgttttacttatacagatgcgaatagaaaccttttcccaaatttaaagagaaactgcacgctatttaactcatatagaagccaactgtttgttgttcttcttagtttttaattaaatgggccaaactggactatatgggcctcccaagcctttgagcagtaatgaacaaaggataattgacgaatcgtaagcgcaaaaccggcgcgtgagtatcacgatcggtttctgtgaaacacatcagagcaagcctttgacgtgattcctggcttggtctctgatttcccgatttggaaacttctcgataacctctgatccaaaagacgatatgagagctcttcttgcagtctccaagtcgatcccacgagcttggaaatagaagag

SEQ ID NO: 27752 - DNA, 807 bp, Arabidopsis thaliana columbia
tcatggataccctaaaatacttggattttcttactcattttaaccactcttgttagtccaagtagctgactctccttattagagcagttaacccgaaccaaaacctaaactttctttcgagccctatatcacttgtgagtgtttgtgaggtcttatttcaattgagcttggtagaaagtgttaggttcgtaacgacagagatagtgtctcatgtagttctagttcgcgttttcggactggataggactaggtgggcgcttatatcacgggttgggatgtgtttaaaagaaaagggtgaattcattgttgataaggaaagggaaagaattctaggggaagtaagctaaaagaagttagaaaaaaaatctagtaaaggttttgggaatgttaaagaaaagaatgaggttcttgttagctaaagaagaagggttaaaagcctttggttttaaagattaaaaacaggaaccttagttgttaaagaaatccaaatccgctagatgtatcagagtgttgagaaagcttctcctagagttaagagaaaataaaagaatgatatgaaaaagagtttgaaagattcatgagtgcaaatggtagagttaagttgggacaggagttgggattaccattagaacttcattgctatactctgggtagatgggatcttatctctgtatgcataacttgggacttacctttagcattctactaaagctcaatcattcttgagggatcccctgttacttaagcctattctgtaagggaccatctttgtctcttgaccttcaccttagccaaatgagttcattg

SEQ ID NO: 27753 - DNA, 362 bp, Arabidopsis thaliana
aataaaaactttgtattcaataaaaaaagggttttcactttgaggttgattttttgtaattacatctcttgggcaatgctttgatcctttttcttaattggttgattttgtgtacacaaacttcattgttgctctcatacatactcaacatgattttcactaattctaaatcacctaccaaatccaaacgctctcatgttctattttgcaaggaaagagagaaagaaagttaagatgaagagagagagagagagagaaagagagagagagagagagagagagagagagagagagagagagagagagagagagagagagagagagagagagagatagagacagagagatacatatactatgta

SEQ ID NO: 27754 - DNA, 589 bp, Arabidopsis thaliana columbia
tctccttcatcatcctccccttcatcgcccatgtcatcatctacatcatcgtcagctctattttcaacatgaaaactcatttcgatttgatcaccttcaatctcttctcgcatgaaatccatctgaataggttcaggcagtattgtctcatcgccttctatcctcatatcctgaggcatagcctgggtttgactcgaacccctttcacctgcgctttgagaggaaacttgagcctgctcctgtccattacctgctgcatctgttacttgctgtagactgctattattttgattcagctcatcagcttcagtctcagttgaatttccatgactatcatgtctctcatcagagtctctgttttttttctcgtttggtacttctgattttagctgctcggcagcatttgcagcccttgtcagtgtctcgagagacttgagaataagagtgacaagctttggagcatcagggtggtcaagatcaatcacgtgaaggatgctggtcaaacactggatagtcccccgtccatcatgctctttgcaacgtcaggtgaacagccacaaccagggaaattgcttgaagatgaagatga

SEQ ID NO: 27755 - DNA, 570 bp, Arabidopsis thaliana columbia
tctctcttaactcatcattacacagacatagcaatggctcagtatcatcaacagcatggtgagtcattcttgtacattacacaattgctgatatatatgttttaagttcagtttcgcatataatcaatgtgactgatgtatttataaatatatatgcagaaatgaagcagacaatggcagagacacagtatgtgacagcgccgccaccggatgggttacccggtgatgatgaaagactctccccaaactgtgcagcctcctcatgagggtcagagcaaaggcagtggtggatttttacgtggatggtaattttatctttttcatctatctataattgtttctcctttcttttcctttgtatattgatcttttttttctgttgcagtttggctgcaatgtgctgctgctgcgttttggattgtgtcttctagggaatcctcccactacactatacacacagcttctactgatctttttgtcttgattcttgatgttttctttgtacatttttataaagttttgattgagtgtttgctatttctgattttgttacatttggttgttgttttg

SEQ ID NO: 27756 - DNA, 579 bp, Arabidopsis thaliana columbia
cttttaaactgcagagtgggttagtgattactatgagggtagacctggtttagacgagctccaaaagagaatcgatgacttcatgactgctcatgaagaacgccttgaacaggttcttctcgtcatcctatattttgaagtgttcatgtctattgtctaagtgactatcgtgtttttgtctaatgttgtcatgtgtgttgaacaggagaaacaagacaaagaagctaaagctgcagaaggtggatggactgtggtcgtgcatcacaaaggaaggaaaaagacaacagaatctgaaaccggaacagccgttggatctttttctcaggctgctttggaggataagatcgctaaaaagaaacagagtgagcctgtcgctcatggtttctaccgtttccaaaggcgagatgcacaacgcaatggtaagccctggcttttctatatcctcaaacgtgttttgtgtcagttttggctcgggtcggtttttatatgcagccctagtcacacaagtggcccttcaatttgtctgccctgattctgatgaattgattcttggttttgtgttttaatgtttgtggacag

SEQ ID NO: 27757 - DNA, 1100 bp, Arabidopsis thaliana columbia
attttgagtagatatagtaacagatcataaacgttaaaataatatcctatgactatgatgagaaagacaaattgactaaaaccaaaatagagctagaagtacgattccaatttccaccaattacttctcttacaagtacaaaaattgagaattaaagagtatgaaaagaaataaagagacacaacagtcaaaagcaatccaagatgatgatttgtgttatgttaatcccatataagagagaaaacagagagatgtaggaaactgtttaaacaattagtcagttaaccgtagtccacatttttagactctcggtcattatcttttcataactgttttctattattataactttttggtttgcaaaacttaatcgacatagagtaagaaaaattgtaattttttgaaaccagactaaactagactaaaccgaacgaattgaccgaattggctgatttgtaccgaattgcacagcctggagtggatgtcctatttgttttaccgaaactttagaaatcacggcggctgaccataagtaagcacctaggcgtccgactaggcggcgactaggacgatttttagaacattgtttagactatctttagcaacttgtctcatgaatttgaatatggattatatcaatagaatagaggtggagaaaaataaaaattacgataaataagattaagattgtggggtaagcttgatttttctatttatagcgaagctcacatgatctgaattgatactcggtgggcttattgaatttgaatcaaagaaactcatgggtccgggtttttgattgaaagaaatgaatgaagtgaagtaagtttttggggttttagtaatggtatataagggagattatatcctatcgatcatttgtagatttccaagtcgccaatgtagactgatattttctcatcttctgcattttatttagttgatttatctaatcgatggttaatgtgatttgagttttcaatggggtaagctttcattatttacttttgtagtctaagatggtcaaagattacttgagaagtttaaattttgaatatatacatattatagatgcatatttagattatatatccttgata

SEQ ID NO: 27758 - DNA, 529 bp, Arabidopsis thaliana columbia
gacatgaaagctgaaatcccatgtgctattccaaggaatatggaccattccaaaatcatcttcactggatctgcaatgtacattcaaaatttctttattttttaccttattgtgaattacaacatgttttttagctagaggtaaaaagccgtcagtgcccgaacttggtgattcggcaggagcattagaaaaatctaatgcatacacaaaaagaataagagtagaatagatcacaaataatattataaaataaggtttattattgaaagtcataattatgtaaattaaattatgtaggtgtggttaaatagaacttagaaacaccctatttatagatataagaacatgtgattatttttgagagtgaagatgactaacattcatgtaacgttgaatttatgtacttagtttatgttagtattcaaatatgtaaatttttattgttttcctttgtagttatagattctttagctttaataagaaataaatatatgtttggtaaaaatatttttggaacatatcttatata

SEQ ID NO: 27759 - DNA, 546 bp, Arabidopsis thaliana columbia
cgcaacagaagatacagtttttgcaccacttacaaagaaggaaatcagtgtgcgtatttaacaattaacttgtggatctgatcttgtctgtgtatgtatgatgagtctcttatcttcttttgttgtggaatacttgtaggaaatcacatggcatcggcttgatcatcttcagccagcaagtaatgaggtgataactcatggagtttctggtctcaaattgtacatggtggcacctttcctttcgtgagtagtggctctctaatttatacacatagatttttgggtgattttcgtgttttggttcataacaagagagattacaaacttgtgcaggtcattgaagtcgtggatattaaagcatccttcacctgtagcacggagacctaacaagccccttaaaggtttgacgtctttttctcaagcattcattaacagagaggtttttggtagagatctgactatatatgctttgtacagcactctgcgtgtggaatgcaaggactagtgttggagggacgggacacaacagtggaaagcgaaatagaa

SEQ ID NO: 27760 - DNA, 720 bp, Arabidopsis thaliana columbia
gtaggcccacgcaataacgatgttttaactgacccaacaagcccttgtccagttctggcattatacaatgcgtcggtcgacacgtgtaataagtcatgatcggcacgtgtggtctccacttctcctctctcattggtcgtaaactcgtaactagccgattccttctccaaagtatctcacatttccactgcacactctactttctctctcttcactctctcataaatcacaacaacaacaaaaaaaaaaaagttgttagttaagacattgctttacagctcaattgcgtcttcttcctctgtcttattcttcatcttcatcttcctcctcgcggatccattttgaggttcgtgtaaattcccattctctttcgccatttttttgggggaagtgagattttggtctgagttatcggcgaatcgatttcgtttttttagattattgaatggttttgttgactcttcagttcttcttgtgctgtgattgcaatgatgtcctccgaatttcgtgatttaagttcgattttagctatccgagctcctctttaaataatgagttggggttttattctgaaggttcgatttctgattttgcaaatttgggaggtggatttgatccgattagataatctcactgttctgggtgctgtaattgttaatgagaccatgcaaatgttgtgcatcgatgttgtggaagcttgatttgtaattgaggatttgg

SEQ ID NO: 27761 - DNA, 740 bp, Arabidopsis thaliana columbia
caccgatgttggaagttaatcggaaatcgcctatctcgtcggaattaaatgaattgggtcggaattaattgggttgggtcgggataatttcgatttcgatttggattttgtttttgatttttcttttaaaattaattgatataattcattaagggtaaataggtattatccactacaagagtggcatgcagatcaaaagatggcacgccggattcaaatttccagtttagtggcattgttgattaggactccttcaagttggaataggacggtcggagatcgccgtggtttttaccgtcgctgtcacaatcacagccagagccgcagtcactttgctcattcctttgcaaaaccctaaaaaaattattgggttgggcttttgattgtatgttgggttttttaattgtattgggcttttatattatttgtaatggtttattttagtagggtgaattacaaaaatgacggtttttgaaaaagttattaaatatatagcaccataatgtgtgtaattcatttgatagcacatgtcagttgtgaaaatacacccaactccttcccaacgatgcgcttggagagaaagagaagccacaggaggaaagagaaatatatatgagtaatatatattcaccctcttgattttgtttactttattagtttaacaatattacttggttaaagttaaagatactattgaaaaaacagattttatttttgtttatctaatatgatttgaattt

SEQ ID NO: 27762 - DNA, 939 bp, Arabidopsis thaliana columbia
aggcactaagtctatgagccatgatctgttcctttcaaatgtgacccgtaaagctataaggcaaacataaaaaaaaacgtgttcgtttttaagggaggactaattgcctcatagcttcttcaaaatttcttcgcaggctcgctcgtaataagtcattctctgtatacattttacagcatcatcaaacttctggctttcaaacgcttcgacgaaagagtcagaccattgctttagtttctcttgtaccttgagaaaaacaacaaaatcgcattggttagatcagtttggcatattcaaccgatgcccagagctacagattttaaggtgtttggaaagctaacggaaagaaagaccatttgaaggaagctagctcaatcaggaattttcaaggtacctgggatcggatctggtttaacgatgttgaatcatctgcttctgatatggcctctctgagttccataatctgacaccattttcaatgaatataactaagtgaaaatgtgtttatttatggcagacatgtatctgcacctttacggtagaagaaaaagtctcacaaactaatatatggcatcaagactaatctttggcaagtacattcacttacctccattaacaatgttgggtctgttattgtttcttcttcattgacatttacaccattcagcttcatctacataatcaaatagtttcaggaaaacttgcagctttggagaatcctcaaaaacgtaatgacgaaagttaagaagagcttacgatatacattgctctcgacagccgctttgttaatgtccggcacgcttcagtcacctttgcagactgctcggctgcgtagtctcgttctttctgttaacaattcaaaacacaagagctaatttttaagaacagaggagtaataaacattgcgtcccatagtaaaagagaaccagaaacaaagag

SEQ ID NO: 27763 - DNA, 539 bp, Arabidopsis thaliana columbia
aaatgaacaacaaggggacaaaaggcagtatccttaaacatctaaccgggacatgtcaagattgaggtagttttctttcacattctcttcaagtgcctaatgaagaataaggttaagaaaattgtatcagaataagaagactattgtccctttcactagtcaagcatatatcactcatcttcaccaacctatataataattttagatttccacttaaagttttttatcttaacgtttattaaacactattatatatagaatttttatgttagcatttattaaaccctattatatagtaaccaaaactttttttttttttttgccatccgattaaaattaggactcaaacgagccaaaactgaggaatgttgtttacataagttatatgaagcggttcagtgcgaacttttcgcgctaagttatccgcttttacatttgcattacgagaaattaaggataaagaaaagtatgtgaattcttccctgtcgctctgtagtcctccaaataagctgagaacgtcggccattcggttggagaag

SEQ ID NO: 27764 - DNA, 618 bp, Arabidopsis thaliana columbia
tgggttatagttagttttttaagagctggatagaaagtctttcaggatttatgtttaaatggaaccaatataaaaacttgcggtccgttaattgcgaaaagtaccaaataacatgattttttttttcgttattttactatattatgaattctcgcttgtaccttacaaaagaagttgtttaatccgttgatcttagagaattttttggaagagaaacaaatatattgaatcataattttgatgacggaagcaaatgatttgcataatttggttctcggtcaaaattcattataagttggaaagtatggaactacttgattagaaaagggtgaaattctcagacccgagttcagtcctctctgaaaacaaaaatcacatttgtttgggaagtctgtcagttgggtcttgacccaattggtttacctggtagtcagaaatacaggtggcctgactatcctctggcattagtcggaaaacattccaaactcgggacaaatagtgtggtggtacttcggaaagaagtccctttgaagtatttcggtgcgtttctacgaaaataccggatcagcgatagagtttataaaaaaaataatgctaaattatcaatacacatggaga

SEQ ID NO: 27765 - DNA, 577 bp, Arabidopsis thaliana columbia
ggttgtgtttgtgattctcacgaacagagaaaccacgtggaggtagagtaaaaatttaaaaaatttactctacagagcaacacgggatcgagaatttgaaaaacttctgttgcactcagaggccatgaggtcgagtaagttggtcgagtattagtgatgattttaagaaccaaaaatttgaaattatacttatactcgaccaacagaagctacagagacttgcatggagtttaacaagtttacagaggattatagaaggttctagttaacagggaacagtgcttcaggacaaacagaccaagtgcggcccaccttctctactctatatacccccccacgcgtatatattgataagaaaatcccaaggcttcatcacagccactcgatccaacctcatctctatccaccgacgccatctctccctcacaactctcacatgaccaaacctcacccgtcatctctctcaccgtctctctttcactcgattgtgacgtcctctccaatcgccgcttactcgaccacctgaccttcaccgtctcttcgtcgcctccgtacactcgaccttgccgttccagtt

SEQ ID NO: 27766 - DNA, 917 bp, Arabidopsis thaliana columbia
ttcttttttaaaaaaacattatatatctttagagacttcaatatataccttatgtttatacattcggatttggtgtaatatgctataagcctataatgttacttactatgtcgcttcattaattagtcaatatatacattagttttatatattcaaaactacctgcttgacttagaaattgaagtctgaattgtatgggtacgtgatgcagaagagatgatcacgatgcggaggaatttggaaggcaatattgactacagaagctctaaaaggcggactggagggagtgtatcaaatcaatgccgcagtaaaagttatatcgagatcgtcaccacttatcttcctgaatctgatgattcgtccgccccctgtataaagtgtaaccacgactattgttatagttgcaccaagaccagacagtgcacacggtccactggctcaccctggacgtgcaccgtcaccgagttgtgttgccttatagtatattcatagctttagatttatcggaggcaaaatcaataatctgttgaacatttctatatattttacatttgtgagttggaatcatatgtatactattgtttttatcaaaataataataacaatatatataacgttatataacactttttatctatgacaatgtcaaatcttgatatgtaagtaacaaggtgagtctagctatatataggcttgatcttcatatcttggagaccaaatcaaagcacaagacttagacctttattatatgatatcccaaagagcttaagaaacttacctttctaaaaatatatgactcagttgtttctgttaccaaagaaatgaggaatgtgatgcaaacaaaagtaaaggcaatttttaggcagagttaaataaaaatccgtttcatgtaagtttttcattatagtccttgtacc

SEQ ID NO: 27767 - DNA, 734 bp, Arabidopsis thaliana columbia
ctcaatacggagttcgctttaagatctgttatgtcaactctcggcgccctggccaggtgttcgatgcgcgtctcacatggatgcagtggtgaaataatccacgccctattagaaacataagtctattggaattggctctgtatcaatggaatttttctaatagggatagccgagaccagttttctcgcacttaagctctggttcggacagaaatataagccgaaccctgtatttcgcgatctgccgaacaaatgctctacggggagtaagccgagcccagcatctcgccctccaaataatatgctgagtccgtctcacttattcttgaaacagagcccagaactccctctttaaaacatgcataggcctgctggacataagccgagagacgtctcgcgtccagcacacgctgaatattgtctctcaaaagccgagcccagtctcgcacctaacatctaatccgaacttagacagaaaaaattgcgttactccaaaaagaactcaaaagccgacctcaaaggtcgcacgggaaacaagccaattcataaaagttgtattatattaatcaacgaccaaacaagatcgggagctattacaaagaataaattagagaattaaacaaggtcggcagccataacaaaggcgtttattcgaaaacaaaaagacaaaaggaaaaacgatctgaaaagccactaaggatcatcttctatcatcctggcatccggggatcctgt

SEQ ID NO: 27768 - DNA, 506 bp, Arabidopsis thaliana columbia
tttgaggatgaagaaattggaactggcacttttcttttgccaaggttaattggagtgatggacattttagtttttaggttctaacggtgatgcctctaagttcatttttgagatgtctcgatgaaagattttgttggagaatcgaagaggaagttcttcttggagtctttaaaccttgcaattaagaacaagatcaacttaccagtgataaatttatcattacattgtctcatgtacgttcttgtttttcgtaacaaataaagctatgaaaagtaaaattaggaattgattattcttctcggttttgagaaacaaatattaagtcacattttccagtaggttgataataccctcacaacaaaacctctgtttatcatcacgtttcactatacctaagaacacctttctttccccacgcacaaccgatttaaagggaagaaaacaaatcttttccatcaccaaatgaatgagtcatgcgtgcaatcacaatttgaatttacatatga

SEQ ID NO: 27769 - DNA, 547 bp, Arabidopsis thaliana columbia
cgctaatacatgtgcggtcctcatgcaacattaattaattgatatttaaaaattaaagcctgattagtgactgtgaggaacactggagcgtgggacacacgtgtgacagaccttgcgtgtgggtttaatttttctttttctgtttttaattcatctcacttttttaaaaaaaaacatttatctcttactctcaaaatgcttctatttatagaatcatatgatatgtactttttccttatcaaaaagtctatatatggtggcataaaaagaaaagtgtctataaatgttttccgtttatatatttatttacatttgtgtcagtatccgcatgtgtgcaaatatgattcaacttgaagtcttgaagatcaaatctagatcggtaataaacaagattaaataggtttttttggttacattaacatggtaccaaactcgaatcatattcctaccaaaataaaaaactcgaatcatatttctttagaaaattcagaactaacgggtcggtcaaaactgttgtgcgattaaatagttaggttatgaattaaga

SEQ ID NO: 27770 - DNA, 650 bp, Arabidopsis thaliana columbia
caatggctaaatccaaagcagtacactctaacatctgcttagagagtgtgtcaccacattcaaaagcattatccacatccaaatcaactaaattcttggttttgccttggttctctctaacccacgagtctagaatatcagtgttcatggagataatctgtaattgttgttcaagtgtttctttctcctcaaccatctctttcaaccctatattaagctcatcctctcttctcttcagcccagcttgcaagctcagcagctcctctgcttcagcttctctggctctcctcatcgaaaccaaatcgctatgaaccatctccaccatcttattaatcgcatttctcttgaaaacctccgccgcatcatcagattgctgctggtggtgaacatgctgcacttgcaccctacttactcctccgccgtaaggtgatggcgggaacggtctaggcaatgactgatcagccgaaggaggtcgtgacagagacgaatcgtataccgtaggaggagacggtggcggtggctgaggacggcgtcgagaataaagaggcggatcacgagcaaaagcagcgctgaagatcggagacgagatctacgagattggagctagggtagaccaattctgaaggtacgaagagaacgagccagaagga

SEQ ID NO: 27771 - DNA, 459 bp, Arabidopsis thaliana columbia
tatgtacgactaactaaaattagttctaaaacatagaatatgatgtaatccactcccataccatatagtagttttttaaaaagaatacaacaaaaacaatttaagttcgaatgtacaaacaactgcatgttgaacgcctcttcactttttttttttatttttcttttttcctaagcatcaatagagttatagggatgcctcaatttttttattttaaagtataaattgttgttaaaaacaaggaaatagaataaagtataaagtatatatttattaataactccaagaaattaaagtgtttcctttatatttatatagatgtaattaatttgtggtaaaacaattttaccgtcgagtgtctgtgactccgtcttcttcttcttcttctccctctcacatcgtcgtcactttctttttggctattcttctctctgtcatcgctgtctctgacttcattgt

SEQ ID NO: 27772 - DNA, 538 bp, Arabidopsis thaliana columbia
agattatcccttttcattgtttgcttcgtatttacttacacttaccatagctcatgtacagatgttcttaagcttgggaatgtgacccgaatcaacgagaggtgcttggacttgcaaaagaagaagatatctcaagtctctaaaaagaaggtacactttatcaacttgttttatgagatgatttatctatatataaaagtgtgttccgtctcgcattgctggtagcctctgaattctgaatcaaagcttccaaattaaatgaatatctgcttgtttcgtcattgttaatggtcatttagctaagtagagtaaaagtaagatttttgctaactaatggaagcttcaacatttcagaatttaggtgcaaatgtaagaatagtacgaaccaaagcttcttgcagatgcccaatgcttagaaaacataaactacagagagaattcaaggctgagagtttcaacaagaagccatggacattgaggatcttgttcagcttggacgagagatgagaacttgtccatactacggttctagaagaat

SEQ ID NO: 27773 - DNA, 511 bp, Arabidopsis thaliana columbia
tatcccctatgatagagatagactatatgaagtccttctatcatctttagttgttacttgttaagattgaggttaccgtagttgattagactaattaatattagttgatccaaaaaagtatgatattcaggagtagtgtagagatttcggaaagattcaaggtgaccattacacaatacttaaatactattcgcaatgacaagtgaagcatcgttatcaacttctccctctcaatccccaccaccactctctattacctcatatagatagatcatcctagtgatcatacacacaacattgatagcgaacaccaatagtatgctatattcacaacaaaacaaaaatggactaattcatttgtttttttgaagtaaaggaattgaacaataattattttattttttttgggaaatactattcaagtatttgaaattagaaaagtatttagtctttttctctttaaaatatgaatgcaagctggccgctggcggcacacacagcacaaagcatg

SEQ ID NO: 27774 - DNA, 583 bp, Arabidopsis thaliana columbia
tgattttggaagctataccgaaaactgataccatttttattcggttggatctcttttcttttggttccaattcaacaggagaatcaaaaacctctgtgtttttaccagagttccataggaggttcccaagtttgagagagatggtgataaagaggaacagtttctacagagaccacaactctttttttttcccctaaaaaaaaaaccattggttggattagggttataaattgagtcaagaccctttggtgatttgataccaaaacctaaacataaaaaaacttcaaaagagagagttgagagaagcttactaactggttcttgggggttattagaaagtttatagagatgatgatgataatgggttgggtttatgtggagggattagtcaatagtggaagatcttaaccagaaacagggatatggggatggattgattgactttataaactagtcattgattcataaagatgtatttttgttgtgtgtttttgagtgtgctaattgtgtgtctcaaaagaaggtggtggaggtcttgttttacccagacattttctgtttttgtcttttgctattgtgtttg

SEQ ID NO: 27775 - DNA, 521 bp, Arabidopsis thaliana columbia
tgaaacggccgaaatgccaaaccgtcctgccaaagctaaggaaaaaacggtcgaaaaaccagaattaaggaagtcgacagagcaaccgagaatcctgagcccgccacaagagccggagctgccgaagtgtccaaaattcctgcaataactcctcaaaagtacaaacccgtgcttcagtgcctgatagaaagggtgaaatcccaaagaaatcttgtgaagctggtatgacactagatactgccgaagctgggccatcaactcccatcgaggcatatgcttcgaaagctattcctttgaccttggaagaagaaaatgcgcccaagaaagttaagtctcctactcccgaagtgcttgctgaagaactggactttatcgtgcgacatgctttggggaagcaactttcgaaagagcagattgccgaagctaaacaatacgccagggatctaaagtacccagagagatccttgatataccacggtactgacgaagacaaatttttgtattgccttccggatgacttg

SEQ ID NO: 27776 - DNA, 515 bp, Arabidopsis thaliana columbia
gttctttgtttcttaattagtactagtattaattaaagtctgcatttatacgaaattgtctgattataggtcctaagagtaagagacaacacaaatcgtcaatttaatctaaaaaaagggccaaacatacgtataactgtttaaaaaaacttttttagttgtttaaaaacttataatcatgaaaagagaatccagcggtcagaatttgttcaggggttgagagtattactacagcttaaacacatctctgccatttattgcaacagcaatcatctcgcttgtaaaccgcatctgattgcgtcctctgaatttatttccccaaataaactctgtatgcttcataaatttgagcattgactttcccattttggatatgatcatattgttgttgtcggatgagaaattcgtacgtagcaataatttaatgttttcccacatgaacgattaataatttcggaatgattaaaaaagatactaatatatatatatatatatatatatatatctatatattt

SEQ ID NO: 27777 - DNA, 538 bp, Arabidopsis thaliana columbia
caaaaatcaatactttcacaattactagatgatcagatattagggatcttgaatccctagacacacaaatcgtgaaaccctaatttacagaacaaagaagggattcgtgagattgaacttgagtagaaacagatcgacatcacaggagattgaattgattagagaattgagcttaccaggggatgagtgttgtttaggttatgaagattgcggaggagacggtggtctctttgcggtggcgatagatgtaacctgacggcgagagatgtttgtttgtttatatttttggacgcattttaaagttgagatcgatctatccattgtttccaagtatttaaggcccatttattattttctgaggcccatagacccgattgaatagtattagtcaaacaaaattttgaataatgggcttgaatggtatacagctttgaattgtttattgagattattacattataagacacttttagaaaactatttacccgtttaggcactttgaaaggagaaggcactttaccaaatcaaaattcccaaa

SEQ ID NO: 27778 - DNA, 627 bp, Arabidopsis thaliana columbia
catacccatgaataaatataacatctaaactataatggtcaaatctcatcccatatgaacaaccagcaaactacaactcactatcgtagcaagaaagctatgttggtccgtatactccgtagttttcgcacatggatgcatatcataatgaatttataagagtgcatgagggttccaaacaatgggtgggggaacaagtgtggtactagactaaaaatgagtcgagtcattcagaattagcaaagagtgataaaaatgatgcaaacaagactctgaatgtatgatccattacatgattctcaagcctctaagtgagataaattaagtccagattaaggtcaagtatataagataaaactcaattcatccaaatttcaaagagataaggactactataaagcgatctagtgatggattttcctgacctttcaagttatcgaataatgctaaatggtctcaaggcaatgaaatcaagcatgatgcaattccctaagaaaagatcacagttctcataacattttgactcaataaaaagacacggttttgactcgagaagaaacaaggactatctcgaatagtagcatctaaacaaacaagcagtgcaaactcgattagtagacaaatgac

SEQ ID NO: 27779 - DNA, 791 bp, Arabidopsis thaliana columbia
tgtgaccaaactaaatgaagtttaaacgctaacaacctaaccaaaagctcctcattgttcactaatcacactgaaatagtaaaaagatgacatttttatcaatgacaaaaaacagaggaaggagtttgtggttaaatcgagccagtgtgatgcttctttaccaaagaatgacaaaaataaagaaggatcaaacgctaaaacgtaactactcactaatcacactgaaaaaggaaatgcacaagcaagcaaaatccgtaacaaaaaaaaaaaaccctaaaacgtaactaaaagctcctacaaaggcaaatgcataagcaaaaattgtgacaaaccaaagcaagctacaaaaatctcaacaacttagaaaaaaactctaaagagtaacactgattgcacttacaaagaaaaactcacaagcagaggaagcaaccaaaggaacctaaaggatttagtatttatagacaagagtatgggtgactcgaaaaaccctagagataggacagatgtcaccatcctctgtcatcaaatcgtatcaatggctgcgagaatcgctactttctccgtacaagctttcaattcatcaccactgctctgtgtttttgtttcttgtcgttttccaactttggagatgaccgtttgaccgttgttgtgccttagacgacgtcttttcaacattgggctttatctttagctggcccaagttcctcttttcttcaattagacccactttgctaaacacagtcgttttgctctctcggattgaggaattgtcttaaactcttccaaggatg

SEQ ID NO: 27780 - DNA, 813 bp, Arabidopsis thaliana columbia
taggttaagcgttaatatatgttgattaggttaagtgttgggcaagcttctagacttggcacaagggtgggcgactagtggtgagagtggtgaatagcccatgcacatgcttggtggctagtgtgacttagaggctccggaacgggtgcatataacttctaacaattgggtcatgtcttcaccctctcgacataacttctgaatggctgaatggattgtggtgattccacatcgaggtgaagaccttgaacggatgacataattctatggtacaaaaaccgtcctgaaatggggtttgatttacttttactcatttttgcttgaaaactcttaattcttccttgaaatacaaatacttggaaaaaaccttgaagtatctaatatctcttgatttctccatgaacaacctagtaaaaacatagtagaagtgggcgaaaatacgatgttatcatccaccatggctctccatcaaccaaaacataattatgaaagtcttaaagacttctgaaaagtttgggctcaaaccaagcttgtttgccaaaccaaacaataaaacttgccactaattactttaaactaaagtgcttcccaaacagatttataattccattactatccggtagaatttgattcgcactgtggaatatggagcatgtggtatcatgaagaactccaccaatttacagccagatcaaatatcatttcgacctccaaacattgctattgatatcccatctcagaacttttttctggttcataattagcatatatttgcagatcattccaacagttacttggccggaaagtaacacg

SEQ ID NO: 27781 - DNA, 405 bp, Arabidopsis thaliana columbia
cttgggaaatagatatcaaaatactaataacatatatgaaaatgagtaaatgagttttttcgattttggaaacggacccatttgtcgaaaacttgaaatctaatccagagaatccgacagaaagagaagcatccggatccataaaattttagcaatctcggaaggttcggggatcaaaattcgaggaagaaaatgcctattcaaatcattttcttattctgacataaaatcagattataaaaaggaaaataataccgtttgagagagaagactaattaaaaatttaggagaaaaacaaagactagagacagatcaaatttggagaagtaagattaaaaaatatatattgagagtgacagtgaagtgggtgcagcgagtaatggctaaaaaacagagtcatagatg

SEQ ID NO: 27782 - DNA, 419 bp, Arabidopsis thaliana columbia
tcttaccaacattgaaactcttagagaggtggtgtgaactgtgagctgcctcttcttgtatatccaaaaaggattctttacaaatttaccaactatatctgttttgaaattatgcccttttataacagaccacaacatatcatcacccaaaaccagtgtccctttttagtatacttccaaaatcttggagaattggtgagaggatatagctgcaaacaacttttggattcctatatgtgaagaatcgcaaaacgaaaagatgactgtcgattagtttgcaacggactttaagcttttgaatctcatattttttgcaatataggtttttacaccgaaaaccaatgccaagaaaaaatgtcagtttttgttttagcatagatcaacattctcccacagactgtagatcactagccagatat

SEQ ID NO: 27783 - DNA, 569 bp, Arabidopsis thaliana columbia
cgtgacttaacaaactcttcacacatctagcatgtctttttcaactaataaaaataatgattaattccgtaactgattcaaaaaagaagttatagagttatgttaatgattggtcagtaaatcaaattagtccatatatttcggtttagcattacattgaacaaattaattacacactgatggtagtagcattttcctctacacacgataataacaaatcatgttctgaagaattgaaatatatgagctaataatcgttaagcaacattcgggataacccaagaaaatacatatattcctaaacaaactcctgtatagtttactttatatatatacgtaattatctacctttatgcttacactgagcagtaaaaaaacagagtgaagtcattataacaacgaaaaccttttcttttctcgaaatagtattattgattccagagacaggtaaagaaagagaagaatgtttcctctggaactctaatatgattaatctctcctttttatctgaagattttagcttcccctgtttacctgatggaacaagagaatgacattggaatatgact

SEQ ID NO: 27784 - DNA, 413 bp, Arabidopsis thaliana columbia
  unsure (1)..(413): unsure at all n locations
gaactttccatacatgcatcttagtctgtacgacgaagttattgtatttgatcacgtgcaaaaggtattgcttctgttaagatatttggtaagtacatgtttgaagaaccatataagtctttgaaccagaagcgttgcctttgaagaattaggttttatattatatgtttttcggatatgagttcatgttttcaagcagagacaaagcttntcatttcttgattttgtaagatttacatttaagactccatcaatgaaagctgtgatcataatcactttgacaaaagacaaaaacagagaaactttagtgtttgttatcgtaatcaacgatctcagaatcgtgtacggatctggagttttgacgatggaacgtgcaatggaattgatcgaatcttctttctcgttctccgaat

SEQ ID NO: 27785 - DNA, 575 bp, Arabidopsis thaliana columbia
tgccatgtaaccgaaccaaaccacaggcattctgcagaggtcttggagaatccacagtacaagtgtgataggtcctttcttggcaatgaacttcttgagagtgtactgcttcttgaaaacgatgatgatgcatttggggataagaaaaacgagaaacaaactatatagagcaggccaaagaatcgggtaatataatgccgcccactggcagcccatgacacggaactcattccatgtccatgaaactttagagcttagaccattgatggaaaatggtcgcatttctgataaggttaatctgcctttgatatcagtgacttctatttgcagccaaaatctatcaggtaagggatcttcaaaggccctataattccatggaagtgaaaagaatgttgccccggaagaagaagaatcgcctccatgttttctcattggagcttccatgaccagattatcaaatccagggcttgagtcataaactctagctacaacttccacaaccagagaatgagaaaaaacaatggctcttattgcgtcatacgatgatgagatcatatgttggcagcagtatttgt

SEQ ID NO: 27786 - DNA, 835 bp, Arabidopsis thaliana columbia
ccccgaaacttgctctccataccataacgaatcatgcctcactctaacctcttagacaatcaaacttaactgttctcagattattacatcaaacccaattgcacaaaattggagacatacacaagagatgatcaatgaacagtccaaatatgattggatggatttcttttcagtaacacaagtgtatgagaaaatgagaagtctttgtggctacgtactggtccatcgatgttaaaagatgatagaacatacctggtaacaatatatttgacatacttctgattcgaaatgacgctttcggtatatggattatctagatatatgtatctcaatttctaccatcgacatcgaatccagcacctgtccaacctcctctgcctttgttcattattccaattcctcttcccctcccttgattctgtggtttctttttcgcttttgattctccttcagctgttgctggtctctgtccatgttctttaccaccttcctcgttcccgtggttattttcaggttttcccgggtgagtttggttcgcattggctgctggtgcgctgtctactacagatttagtctccggttcttgcacctaaatatgaatgaaaaaatgtaagatgttaaaagcatctttcgtgcatcactgattgtcaagcaaatagatttgattgttcatgtaacattttgcaaagtattagctgtggttatcaacatactcatgcaggaattatctggtgtctctacagttagaataagttgccttactacaaacagatgtaatgttaactagaagaagagattgtttacttgctgaatagaagtagatgatcgatttgga

SEQ ID NO: 27787 - DNA, 698 bp, Arabidopsis thaliana
caaacaaataatctccctagttcttcttgttcccttctcccttctggttcttgtctgtttaataatagaaactcattttgggttatttttaatttcctctctaatttaagtgcttcttgaaatgggtgcacaacaaaaggagatgctacaaaaccaccaccgaatcaaatctcctcacctaaagattcttcactcgatcaccaagcaccaaacccatcactcctccatcatcaccatcatcaccaccaatctttcctccctactccgatcttcatacccaccgtatcttctcccggagctccggtcatccccaaaagaccacgtttcagcacttccagtggtctctctcctcctcaatggaaagccttgccgtctccttccaccgtcccaacggcttccacaatctcttcatcaccgacaccttccaccgccgtggtaacagcttcttccaccgaaaccgccggatcttcaccaccgggtcaagaagcgaccaacagtgaaaaacaacaacaaccaaagacggagtcgtttcaacataaattcagaaagggcaagtacgttagcccagtgtggaaaccaaacgagatgctatggctagcaagacgctggagacgccagtactaaacgcaaggcactgggtctggatctgggtcggtcgaaggaagaggaaaactcgtggtgaaaaagacagggaagta

SEQ ID NO: 27788 - DNA, 227 bp, Arabidopsis thaliana columbia
tataatatacattagtatgatgtaatgcagaataaccaaaagcgtgtggtccataggtttgttcaaaagaagggtatggagtagagtaaatgattactcttatggatccgtgtcaatgatcagattccgttatccccgaaaattgtgatagtattctgttacaactatttgcaatgatctaattaacacttgtattaagttacatatatatatatatatatatatat

SEQ ID NO: 27789 - DNA, 603 bp, Arabidopsis thaliana columbia
cgatcaaagaatggccaacttttgcagcggaattggcccctagatactcattcagatcacactttagaaacacttacatgggaggcaactgcccagctgtccggacaaaactcgccagctcaatatctaaattaatttgcaagatcatgatcctgccataacagtggataaaaactccaccataaatttattaaccctttttgttttttttccaaaaagtatttgttatatataacaagcaactgcaacatccaaaatttggagaaaccaaggtggagaggcagacaagttacatagtacagagagacaagtagtatggttgcatcttgttcaccaccttcagtcattttcatcttagaagtaaaagtatccaaaaatgcattgagcataagcaaacagtgaatctagtccactgtgttgtaacgatctactagaaagcttcattgtggcaccaaaaagaacccctccagccacaaagaaaaactgtaaaaggagcaggtattcctagaaactgaaagcattacttccccagaaagaaaccatctcaagagtttaagggtaagtaaactcttgagtctttggtaactaagatagactatgggg

SEQ ID NO: 27790 - DNA, 392 bp, Arabidopsis thaliana columbia
ataaatataacatagcgacaagatctaaagctttgaaataattacaccattattcactgaaaactacttccattagatatacagttacctggatagactgctgagtggatgctggggaaattaaagggacaagtaacttcaccccatctgcctgaacaaatgacgatctgacaacaggttccttaagcagtgacgacaggcagctgattgcaattggaacaccacgagtaggatgagaaggttgcttcaactgcatatcaaaattaaggattgagataccgatggaggacatcaaaagcttttctggattcagtatgtcacaatattaaaggttccttccagatcaccaaatttgcatctatttaccaaaatcaaacaattttgcatacatc

SEQ ID NO: 27791 - DNA, 580 bp, Arabidopsis thaliana columbia
ggaggacacatagccattattttgtgtctcaagactgtttttcacctttcttttaacttggttcgaaagggtttactaactttttgtctcactttttcttactttaatattaataagatttgatatttgtaagtcggtatatactgagttttcatataaattatcatccaaaattcagaaaaaaatcaaactatacggttaaaattaaaaatagaatataaggcataagtatatatgcaacaaaaatatattaattatatcaatatcaaaacacatgtatctctctccgatatattgccaagctaattatagttaccgtttttagcatacaattaagtaaccaattgccaaagcaatgatatagagttttaaaattgttttctaaggaaaatgatggtttttaattaattatgaatctcttttgccggaagaaaagaaagaaaaaagttttgaaacactagttttctcgtggaaatatgaatttgacctacaaaaatagtcatatcgacgaagaaggtggatcggtcagagtttttgatatcaaatcgggacccattgaattattatttttaattgagta

SEQ ID NO: 27792 - DNA, 558 bp, Arabidopsis thaliana columbia
aataggggagaaaagaaaactttggtgtttagtgttttaccgttctggacgattttgactcccgttttgaagatttggatccgcgaggccgctttttgctgatatcaagtggcagaggaacatcttctccaagcattacatctttaagactctttgaacgtgatccaaacactcttctttcttcccatatcttgatctacaaatcacgtaaaccaaatatctcaattagcaattaacttctctattcatgtcttctgtattgcatcacacatctcaagaaccttaaagctcttcatccctaacatcaaacactagactacccccaatacaaaacatgagattgagcattaaccagacaagaacaaaagctccaacgaagaatgaaagaaagagagagagagagaaataccacacgtgcgacacggcttttgccattatcatctccttgagaaacaatgtctttaagagccttaggaagaacattccagaactcttgcacaaactcattaccttgacgcttactgttctgaagaatatcattagcgagatcaaaagagg

SEQ ID NO: 27793 - DNA, 574 bp, Arabidopsis thaliana columbia
aagttcgttcggctaagcactcaaggacaagatagttaagctcttcaactctctgaagcagtttgagagccgccagtggcctatcgccgccgaatccagcaccacatccgacgtaaaccgtctcccttcgcctcttcggattctctctctgaaattcaatcaaatcatctccagcaatggattgaattttaacggaaaagaaaaaacaaaatgaaaaattcttaccaagtttatcacacaatcgcagagaatctctttaacgtctgggttagccatgagagtaagaatcccacaggaagaggatcatgcaatggatcacggactgcttttgaatatttgacgacgtcgatcacaggattggttaggcctgaggaatttgaattttgggagagagacgtgaaggaagcgagtgacggaagtgagttaaagatgcttatcccattgggattttgattactttaataattttgtagtatatatactaaaacgatccctaaacttataactattttcatgcgggtccttgaatctgctttttttgagtagcatgaatgaatcaacggacttgtttgtg

SEQ ID NO: 27794 - DNA, 581 bp, Arabidopsis thaliana columbia
caaattttagaaagaaaaattgcaaactaaaatttgaaaaagtaaatttcaaactaagtttgtttattgtttatttgttaatattaggtgttattttaccatttttaaaaaagttagggtttaaaacttcaaacaaaaaaatgaggttttttttacatgtatttggaaaagatgagaattttattacccttttttcctatattttctctatttcctaacactcgttacagcaataatccatgctgattgtttataaatatttataatttgtcggaaaatgacagctatggcaaatttcacgttataaaactattttttttttttttttgataattgataatataaacttatagttaaatcattaaagagtaacattagcaaaaaaaggttactagaggataaattaacactaggtactgcattctgattggcagtgtgtctccacatgataaaggagttgggaaaatactaaggatataaaaacaaacaatcaaatttgttaatttcttcataggaaatgggttataaaaattaaaagtgaaaacaatttttttttatttttttcctaagtgatgatttgt

SEQ ID NO: 27795 - DNA, 606 bp, Arabidopsis thaliana columbia
tgtaacaccccggttttgatgggttcacgggccgagagaggatataagaccactaagggttgattgggttctctcgctaccatcattaaacgttgcgtttgcggttgctagagtttaaactaatcataaaaaacactttaaactgctccggatctctatagtctgttcgaaatcacccaattctaaatgcttattcccgcaagcgtttgcggttgcaggcaatagcgattggtaaatttttttttttatcaaaccctatatatttcaacaaatacgtaaacatttttaaaaagttaaaagaatattctcaaaccctatatataataccgatcattctcatcactctttccctatctatcaaaatcatgacgtcaatccaaactcaaaaatgacaagatataacctaagtattgtaatattattttcatctcaaatggttatttaattgtcttaaagttcatatattataaatcttctaacaccgtcttatcatctaatcctgttctgtaaaactaaacattatttttctcatttttcgtttgaataatattttcattaaaagacttatcattcacatcaatttaaaagttttatttcaaatgatta

SEQ ID NO: 27796 - DNA, 361 bp, Arabidopsis thaliana columbia
  unsure (1)..(361): unsure at all n locations
tggataaacccataggtccaattggacaacaactttataaataaaaaaactctcaaaaaaaaaaaaagacaagtagaatagaattcccaatcactttatgaaccaaatcacttgctgcaagcaaatcatgaatcgccgaaaatttcgttttctgtaataatgagtatanccatgaaaacaaagaaacaactggaagaaaaaatccaataattcgttttcgtgtaggcgtgtacactcgctctctctatttaaggtttcttttcctgcagtgagtttttttttttctcgaaccccatgggcacttgtggggctgtagtgggggcctgctgcgcacattgctcgatatctgttgaagccagtt

SEQ ID NO: 27797 - DNA, 537 bp, Arabidopsis thaliana columbia
gatcccagtatgatgtaatatgggataatatgtgtatggtccgttgtattgtaattttctggaatttgttaccttaccgtcataatgactatatggtccgtcgtattgtaataccagaaattttaggcaaaacacaaacaaaaaaaaacgtaatgagagttttgtatacattatattttggttttccatttgttttgtatatcaccattcgaaaagtcatacataactaaaagaaaaatacataaaacttttgggatctatattcattaatgatattttgactaactacatagaaaattgagatcttaaccaaatacaataaaccattacttcttattctttttgtgcaattcctccaacaaaaaaagaaaaaaaacttaacaattttagtcttaactacaaatagttaaaaataataatgggcttgtagatatctttccatttatatgagatttgtgatttaggcctatttaagtaaaatacacacgaaaccaaatcgacgtcgtttggcaactaagcgttggacaaacggagaag

SEQ ID NO: 27798 - DNA, 424 bp, Arabidopsis thaliana columbia
tggtggatccagtgctttagatgcctctaagccgagcctgcttatacatatatgcagagaattttgtactatttgaaacgcaccgcattgtacagttcggtcaccattaaattgtaaatgatataaattgtgataataatacggtttagatgcttagaaactccacgttaagggaaaaattgcttacagtgtcactaacttcgtcagtggtttgtacccaaaaaaaaaaacaattcctcagtgggagagagtttatgtcgtcaatatctatttgtcggtcgataagtgccaacctcaaaaaacaatgacacgtttgtatcaatttctgaatcttaatttatactataaaatagtgtatacgtttgtacgcgttgctattgatagataagtggtaactatgtgtgttttgtgtatgtaaatgtat

SEQ ID NO: 27799 - DNA, 569 bp, Arabidopsis thaliana
caccaagtgacattctcatcttcaaccttgttcataacattggtctcgatctcccaattgattttctttttatggttgcagatggtggaaggacttagatcttgcatctaaactaccttacattagggatagatctgtagagagccatctcgggggtctgggaccgtacttcgagccacagtattctcttgggaggatcatagtggctaagaccatcatgataatcgttgttgcggatgacacatatgatgcacatgcaactatacccgaagctacggttcttacggaatattttcagaggtgctatatatatgtgtgtgtgtgtttattcatatctttaaaatttattcaagcgtgtgaaaaatcttggcatgaccaggttgaatattggtgccgatgataaactatcaggctatttgagaatcgtcctcgaaagtgtgtttgaagttatgggagagattgaacaagaaatgtcaccgaaaggaagatcatacagcgtgaaacaagtgttggaaagggtaatgtataagctgaacatgaacctaaccaatgtacatgtatagttagtg

SEQ ID NO: 27800 - DNA, 728 bp, Arabidopsis thaliana columbia
tgtaagcgtccatctacgattgagaagagtccaagagattaaggtttaaaaaggttagtagcaagagtgtgaagaagaagagatcgagagtgtacgtacagtgtttgggaaagcgagggtggaatcgccgccgtgagcacagacaagtggaggatggtgaagccaatcgcacttttgcgcgacaatctgacgaattcgtcggagcttgaaatggaagtagagaggagggaagatagctaagaaaatcacagcgaagagaatcgttctcttgaaatttctcgaatacaatgggctgaagaaacgacggcgacgagttcctccgccgtcgaatggccgtcttctgtgccgccattcaaaaatcgccattagctgaacaagacaaaggttgtttttggagctaaagacgacgtttactgcaatcttggaaaaaaaagaagttcaccaatcaccatcaaactatatatttttttttttttgtcacaactgttttattatttatattacaaagccttttaacaagccatattttacaaagccatataacaggccataaacggacaaaagcccaaagaccaccttctgaagaagagaaagctaatgtgctaataagtcaaagcccacatggcactagagacacggtaaagaggacacgtggaaacagaaaatgatgagttgcagaatgtcgcaggtggagaatcataaccacaaaaaacttaagttcaccggaa

SEQ ID NO: 27801 - DNA, 784 bp, Arabidopsis thaliana columbia
tttcatgtatatatgcgttacataaatagggtggaagatatgacttgtaacaccatattatccatagtagtaacacaaatagagattgattcatataaacgcataaatactaatagcggtggaagattgtgagaagaggctaaccttgtggttttgatacttgcctccagaaccgttgggtgcgtagttaaccgaattgtatcccgctgttgcaacagaaggaagcgatacgcatatggaggaccatgaaaaccagagtagaaaagacctaaaatgccgagtttaaaggaacttacaagagaattaagctacaacagacaaccatcatacacaaccctcaaaatggaaagaaggtccatgtgagatgaaagatactaaatgccattactataccttagttgacatctgacaatctaaaactcagtagaaaatcctactctaatcttacatttttatcaagggatatgatccagcatctacacttgacacttagattgttcacatgaccctaaaacaagaaatcaaaaaccttgtactgtgatttctagcctatctacgcctgtccatgtgtagtgactaaacagtcttaaaacaaataatttgatagtgtcaattcaattgtcaaaggaaactccggaaatgatctaaccatttactatattgctttccaacatgaataaatgcaatcaaagacatacagaacacgataacaaaagaagcttcaaggaggataacaaacctaactaagcaagtactgagttgatatcctgcatatgaatatggg

SEQ ID NO: 27802 - DNA, 508 bp, Arabidopsis thaliana columbia
gtcttaccgcagtgacactgaagcggccagaccacctataactaaatctctacatcatggagcaacgaacagaactatcagctccctcaaagctactctctttacacaaagatctgacagattgttttcggatcactctgaaattgcttgaccacgacgacacaaagcatcagattcttcacaagtgattttgcgttgaccgtctttaacattcacgaaataaaatgagagcctcctctatttctccctctaattttagaaatcaatctaccgataccccaccgttggcgagtggcgacggctattgcaacagtaaacaccggcaaattttgatcggaagtaatgaagaagagaagaagcttttgaacacattggcgagaaatgattaattcttaatattttgcatatcactcccattattttattctttttttaattccttctataatgtatcttttaatcttattttaaccagcccgtgtaaatgtaaattttgacacatgtaaaa

SEQ ID NO: 27803 - DNA, 332 bp, Arabidopsis thaliana columbia
  unsure (1)..(332): unsure at all n locations
gtacaggattcgattctccgcctcttcaaaattctttaaaaataaacgaattgagctaatgaatcaccattttgacatactacatcaatgggatttttttaaaaaaatatatacgaattatggattatattaaaaaaatcatttttaagtagttatgcagacattttgtctagtttaattaggggtaaaaaaataatttacgcacacatattcctatcatgattttatggtttttaacttcctcttttttttttatatgaaaaacgaatttttgaagtagatanaattacattcacaatttccaaatttaataaaaaaatatttttccgaaa

SEQ ID NO: 27804 - DNA, 482 bp, Arabidopsis thaliana
agcaaggtcacattgacttaagcgccccaccaagaattaggacattgcatactaatgttcaacaaagaaaatctaaactcttaacacataagaatcagcaaaagatccaaactttatcaataatccaagtcaaaaccacaagaagcaatccgacactcaaaatttacagctcatagaacttataagaaggttacaaacataaacaaatcaacacacaaaataaaaacagaggatttggataccttaacggcaaaagaaggagcgtctccgccattggtaagatcagaggaagaagataaggtaaagcgtggggcaaagcgtctgcttcctccacgaccacctccaggcctcaagctcagcattgagtcaccttgctgcatcactcgaatctttcgttcgcgttaacaggacagacagaagcagtgttcggttctgaaaatgcacaagacacactatattagagtctcagcgtcacagtaatc

SEQ ID NO: 27805 - DNA, 597 bp, Arabidopsis thaliana columbia
tcgaaaataagagcatgaggctcccttcttcattttctgcatatccttctcagattttacgtacatctccactatactcacaattcacaaggacctcgaccattagctcttccaatttgttacgcgttgttcatatgcaagattcaaacaatacgaaataagaccagctcaatgcccaaaactcaaaattcacatacaagtaggagatgtttattgtcttcgtcgtcattcaacaatatgttttcacattattcctaacattggagcaaccaaagctgagataagaatgatcaagaagaagaattgattgattttgatcacaaaataaaagacataagatccttttgccagataagaccaataataaatgttatattttttggtctaaagttttatactaaaatcgtggttaatcttttttttttttgttaacgtgaatattatgttttgctttgttacaaactccatatgaagaaataatgtgcaccaatttcatgttgcaaattagacgaaacaatcggaccatacgtaacgggccctagggatagccaagtgaaaacaacgttttagactctcccaagcctattatttttaatg

SEQ ID NO: 27806 - DNA, 485 bp, Arabidopsis thaliana columbia
tggagattgaggatgactcgagcttgtcgtcgtttgtaggtattgagaacatcttacagctctagttttctactgatttaggatcaacttgggattagaccatgaatatagactatagtctctaacggtgacaccttcatgattttcacaggtggaggagaatattggtgaatcttttctaaatacaaacaccttagttcggtgactctttgagtttgatggtgaactttgaggctataattggctcaggcaagagttcttctactggattcaataaaaaccatcatcttttggatttaatagcttagcttctctatttttggtctcaaaaactaaagtacaataacgtgtatatacttaataatgaaccacacttaccgtattattgatttcgatcgatcagttacattcacagatgaaacatgttgcggtagattaccatttcataaatcatacaggatcaagttcaaaacagcaagttactg

SEQ ID NO: 27807 - DNA, 1177 bp, Arabidopsis thaliana columbia
ctttcgtttcttggcttttgatcttacaatacaataagatttagatcaacaaacccacacacagaccataaaaatcaacaatcaatcatatattgctctacagtcgtgggatggcgacgaaatctgtgttaccatctccgttcggctcgcattgtccagactcgtcggaagtcctattccgaagaatattcgcagatctgttggccggcggcttttttggattttccgattgaagattagggcttcatagtagatcggtttagtcagtttattagctcgggtcgattttgatttaagagcttggttcggtttggtatagttgattgggctcttttcaaattttgtatggatctaaattcgaaaataatccattaaaccattgtttataatattaaataaccaataacaaaaaaaaaaaaagttctcgccttctcggtttaatcttcattccttttttttaatactctttttttttaatttgttgagaaattggagattaaaaataaagcccaaaataaaataaaaaaccccggcccattaacagttagtattaaacagcttttgcaacagacggcggtaaacgataagatggtgttttttatgtcgtatccgccgacacggcggcagttagtagtgtcggtgggttttttcgcggcgggcgtttctctcttcgtcgccggagcgtatctctcactcgccaacatctcaccgcaacaagctcgcgtcaaagctcgtaatgatttcgtcaaggatcgaatcaggaaatggctcgacgattagtgcctttttttcgatcttgtaggcgttctaactcttaaatgatataaatcaaaagacgatttcgtgtaaattcatgctcttacatgtttggatcattaccagttcaaattcatgttttatgtcacttacagatgagagaatcactcttgacaaaacgagcgaacagagaaaaaatgtagatgtaaagtctttagattctgttatctctgcgctgaaaatgtgaataaaatttcttgatcatattaccatcttgattttctggcattctggttctcgcctttcgaagcatccgataaccgcgactttgaaacagatccaccgcggaagttacttagtctcgaacccgagaggatatggtgatcttttgaagaagccttgtttggtttataagcttgtg

SEQ ID NO: 27808 - DNA, 528 bp, Arabidopsis thaliana columbia
taatagagtaaatggtgtatcttttgattgactattccgtgtaaaggtatggttggcatctgtttgaaagctaactaattggtcatgcttggaaaatgcaagcagtgtgagaaagctcatgaacaatttcaagggccatgatcagtgtgggtgtagaaacaagactggccggttcttattgctattttaattcttaacattattgaaacaacaactcattactctatctatcttcatcaagtcatgtcttcaggttcttacctactactgctatgtgttgtcaggctctgttttctcctgatcttttgaacctttaaggaagagaaatggtggcatgagattgagagattccatgtaaacatgtaaagggtttcctttttagcttaaggcataaaaaacaggcttctggttttgcagagagagaattttttggtgatctcgaccgaactatccctatgacttttataccaatgaatttgaattagcctgttattgatacttgtgacaatcttcaacgcattagatttg

SEQ ID NO: 27809 - DNA, 937 bp, Arabidopsis thaliana columbia
cctctttccgttttttgcttttattgaataaaagaagagctttcttcaacattgaagtcttcgagttctccctgtttaaacaaataattcagagcaccaaaacaaacttcttgatccattgatccattgattcttgaactcttgttttgttatgatccggctgcataatcaacttacaaatgattttacaaacaaaataatacagtaagcaaatgattatgataaagactttatcataaagtcacaacatatagaaatcagccttgtttgataaacaaaccaatcactcagttaagtgtttagtgtaaatcttattcacaatgttattgaaatcttatgtgtatcatctttgttttaacttaattttgaaatagtgttgtgtaaattatagcaatgatattagaaccctctgaactaatgaatctgcttactacatgtagattagtgtgattcaatttaattaggaaatttattgatcttttctcattggatatttttatatgttttccaactgacaacctaatccttttactagttattgtattataaaactttggcaaattttgaagagtacgttacaaacaatttttattttcttttcctagctagtaggcttttttttctgtgcaaacatacgtacttgtttttgttcattcaatccaaaggagaacaaagtttaaagctcttcaacctcatggattggtacaataaccttaagaaagcataagcttatgacatagatatggtaatccaagcatgtgtttgtgataaaagattttagataacataccttggtggaggtatccagaattgagagtggccgtgcgccgtcgaggcgtcgacgacattaccagacatagcgcaactaacggtccaagggtccccatcttccaagagaattctggtcgttcaaggctcaaccatggtcgaaccaatt

SEQ ID NO: 27810 - DNA, 546 bp, Arabidopsis thaliana columbia
gacaagaacagatgatgagagatactctagaggaagacatgagaggtctacttcaccgtcagataggagtcacaggagtagtaggcgttcacctgaaagagctattgcctcaaggcatgatgaggtatttctgcttctttctttagcttggatatgttcttaatctcagaagtgtttttttttttgttttgggttttacttgtgcatattcgtattctgcttgaaaagataaatgtgattgaaattgtttagctctgatgtatgctagaaaaggttagcctctgctgcttgtttcgtcacataataaataattggaatcctgtaatctagcttatccatctcgtgagtctataactagaacctgcagccagccattttttgcttactctgttgctaaaggacttaagaaagatagtctctttgtttcccttcagcatgtccagtaacatcacttctcatgtttctctctttttagtaaaagctcattatatagattatggttgctttctgcaaattatcattttctgcgagccacagatttttgtt

SEQ ID NO: 27811 - DNA, 633 bp, Arabidopsis thaliana columbia
cttgtagcagaaaacacggttatgagttgtcatccagcaaatctttcgaatccatctatcacacacatttatgcgttcttataactgtgtctttgtgaatcatttcataatcccttcactatatcaagctacatatatataacaaaattatgatttattagtaatcaagtttgaaatcttattaagaaattaaaaataatatatttcaaatttttctaatttaagctatgaacaagtataggttttcaagtcttttttcttatttataaagtctttttagaatctggtatttctatgatcggaactaaattagagatagaaaaatattttgaagtaaaaccgaagaagttgagtttaagaacaaatttagagtctgaccaaaacaaatgtattgagtattgaccaacacctaaacaggtgtcggtcgacatcgttcgcggctcagcaagaattctgacggtttaaaagatttgaagcttcttgaacttgtcccagaagagttccttatttacaaacaagtacttgctcgtatttttagatataaatattctttttagtcattttttagacctaacaacctttactctaagctttatttcattttttgctctccaaattctttgaggtttgtgg

SEQ ID NO: 27812 - DNA, 524 bp, Arabidopsis thaliana columbia
atttataagagtcgagatcacaaagaagaagaatttaaaagatagttgtttttgagatccaatacttcgtctcgaagattaaagcaaggtgagagcgacgtgtgtgttaaaataaactatctttgatattgtacatttaattttcgatagcttagccttgtcttgtcgacgacgatggtagtagtagaagaaacaacgttaaggttccttcttaccacggtaaaaaataaataacaacaaccaataattgtaattctataacttaatttttgaaaaacagtttttaatttgaaacaacataattttaccttttatacggactaatatatacctacgacaaaaaaaggactaaatttatagctaatttttttgttttttttttcaatttatattagttagttggaccgacatgaaatatttatttaccttcaattaaagaataataaaacaaaattatctcagcaaaattaattgaatttttttagctgacacgtcaccatctttatgtttttttaattcattta

SEQ ID NO: 27813 - DNA, 689 bp, Arabidopsis thaliana columbia
ccaaataaatgcaattaggatgtatgattagtgagcataatgttcatatccacatggccttactttggcatctgataaaacattcttaactctattaaagtgatagatttccaagcatgtagatacgtttttgaatctgtgcaaagctctctagtaaagtacctggcatagatcatcaagcttatcggtccatgcgcccccctgacaaatagcgactacataatccttgcattcaaagaaaagctttgacaagtcatcgtttgtagctaaaactggctccaccatcacaaaccccagggaaacctgaaatatttttaaccaatccaatcgtcaaagtgctatttacagctaaaaccttaactgtgtaaccaatgacatccatttaacgtagcgcaagtgagagaatttgagattgaccttacagatagaaagcttcacaaaaagaaaaatacgcaatttgttgggaaaaacttactagcgaagtaaacagctgctcaaaaagttcagcagctggaatgtcttccaaatacttcaagattccttctctgtataagttaactgagaaatggacaagatctccatgagtgatcaaactacagatttcactacgttcaagaggacatgctattgagacgtacacagctaaatcttcatcaaagagaggtgcttgtttacagcagggagtggtt

SEQ ID NO: 27814 - DNA, 835 bp, Arabidopsis thaliana columbia
cttttaataatttatgtcaattcatgatcaaaagttaggtctataagaaagttcgagagcgtgatggttttaaaacaataagatgataaaaaaaaataaaatataatgtcattataactattgtacgtgtggctgcatgcatcgcaaggggtcatgttcatacgatcactttgattgtatatatgaaaacggtgaagtcgcctagatggtgtgattattgtcaaggcaccttatatttagattaagtattcgaatatcaataatttatcataaaaactaaataaaagtagtctttttttaatacgaaacagtatcaaaagtttgaataatttagagtacgtgttcctatccatgttcctatacaatcatgaaagcttttggttttaatctttttattttatttttggtattactacaaatttatcattatacaactgtacataataatagtagtcatcactatacaattaatttccccaaacgaaacaaaaacggttgatataacgttgaagtggacattaattggtagtgaatataacaaaaataacttagttatataatatgttcgacgacgttaggttattaaaaacatatatacgaatacgacgtagacgaataagacacggagagaaggtgttttcctttggctcggggacacgtggccttagaaagggaccatttacacaaagagaagagtcacaccacttcctcggcatcctctccggacctcaagctgggcccggcttgtaggtccccacataagacctcggcccatggctccacttgtacttgtacaagactcttctcctctctcatggtttacactttagtttta

SEQ ID NO: 27815 - DNA, 618 bp, Arabidopsis thaliana columbia
tatgaatatatcaaatatacttcaaatttgttacatattccggaattatgtaattgaactaaaaatcataagacacaattagttccgtacgtaccggagagaacgattaattatatttctaaggatgatgaatactgaataggttctaaactttattaatactcttaagtcgtaaaagattggaaaaaaaaaactcaaaataatacgagattgaatacattcctcgtttataataaatagatagataccaaatcccaagaagtaaaaacgaggaatgtatgtaaccattaggaagaacacgagcgcgtgagaacagtacacgtgtctcatattttggcgtgaagaagctggtaaaaaaaaaactggctccagacacattcctttcgacagtcgtgtcgtccgtttgctccgtcaccgtaacggattactaaaaactacagtattcaattctatttccatatgaggtaagttgatgacgattctcatgctattttccctcgttggatcgcgatcataattaagtaaaactttaaatgtttcggttatttaaatgcttgaaataatcagaatctgggatgtgagacctgacggccggagattcgctgcatgctgggatga

SEQ ID NO: 27816 - DNA, 378 bp, Arabidopsis thaliana columbia
aggaaaatttgaaatccaagcacatgcgcatggatgaaactgatactggtaattatagaaattcttgctcccataaatacctggatctatataattgttatataggcgcaatgggatctttgacggaaactgattttattcatgtactatcttgtgaagctcttaatgcagaaacaccattagaaaccgatgatgttgagaagtttggatcgaacatttcacatatagggcattactcagaaatagcagagaaatcagtggaaagatttgtctcagctatatcgtctttcaaatatcctgggactggctctcgtgctagcggtctccgtgcccctctcaaagatatccgcaacacttgtccgtccaaagggtaacatt

SEQ ID NO: 27817 - DNA, 591 bp, Arabidopsis thaliana columbia
agagtatccccggtacaaaccctcctgcttctacactctttttgttctgttttctgtactataattcaaagctgaacaagacataaataaatttcattcttaattacaactgtacatgacttaccatgcgcttttaaagacttgtgcaataaattaatcacacacttttgttggtggggatcatgggagaaggctagcagcagactcatctccatgttcttcatccaactgtgactctgatgaaactcctgaaactggtcttgtttcctccgggataaatctcgcccactgcttctccttaacgagtgttaagaatgggtacaagcagaatccaagaactatgatcacaccgctgatcagaaatgtcttcggggcggccaaaaccatcacaagaatgacaagcaaagaaggaggcaggcacagcattgaaactccaaaggtgtttaagggaactctataaggtcggtgaagatccggtttcttgatccttagtttgacaaaagctgcgaactcaagaagcattcctaatgcgtacaagaaattcagaaactctatgatctcttgaaagctcatccatgacaagaatatgac

SEQ ID NO: 27818 - DNA, 442 bp, Arabidopsis thaliana columbia
cgttttagagcacttgatatttaaaatcttagccctttaattttgtccatctattactacaaatagtctcatggtcttactctttgattaaagataacaaaaatttcaagagaaaaaactaataaagtaaagatctttgtgtgtattgtggtgactggtgaccattgcataattgaaaagttaagtaaatgggtagggaccaatagaaaaaccaagtcaaattacatatagagataaacttgtctaatctctcccgccacccactcctatcttcctctaatctcgcctctcatctctctctctttatcactctcccctctcgtcatataaagacattaaactctaaagtcatctctcttctatctatctctctgtctcttcttgagagctaaaaagaacatcaaatggccattatcgacgttgatgattcattcaagagacc

SEQ ID NO: 27819 - DNA, 525 bp, Arabidopsis thaliana columbia
tgcaaatgtgttttgcattcagacaaaaaattaaagcccattaaagaattaaagcccattgtatcttttgacgttagttttaaagttagtttttcaagtgatgttaaaacacttaacgtcatcacttgttaagtcattttgaaaagtgactttatattgttagagttagttttaaactgacgttagggtatttaaaaagtgactttttcgtctgaatgattcatatgatataacacatcaagttgtttacaaaagcacaaaaggaatgaggacaatcaactacagaaaaatcactacacctaagtaatgcatttatgaacttcaaagagattctatagctaaaaagagtagccctaggcaggctacaaaagattgtgatcgattcctccactgtgacaataaagccggcaagaacatgaacatttccggagacattagccggcgagtaacaaaaacctcccggagacattagccggcgagtaacagaaaactcccggagacaaagactaaacaaggtaaacaaag

SEQ ID NO: 27820 - DNA, 380 bp, Arabidopsis thaliana columbia
atcgatgcctgttcggtatcctttttttttagttgcgatgattgtttagctgagtttcttattgcttatctatatattatgtatcaaatctccttgtttgatctatgatcatctttctagggttttgctcgatttcccggattcgggtgggaaatcatcatctgatcgattatcgcggctggacatggaggtacgttcttatatagggatagggtttctagatttcgctattacagtttatgaacctgttgagtctattccacatatgtcttgtagaattggattacttgattgtgtttggttcgtataaactctgctaactcaatctctgttcgtactctcgtagggatttatagggacaaatacaacatctcgttgat

SEQ ID NO: 27821 - DNA, 507 bp, Arabidopsis thaliana columbia
tattgtctgtgagtgtgtttatgtttcttctcttttacctcacttagctgttgctgtaggcttgaaacaatctatgttgcaaaatcctactgatcttatcatctccccaaacctgttatcatacatgatcatcaacaacatgatcatcaacacatcatagaaactctgagaaatgtacctgtcaatgctattccttcctttctctggttgtactagttgctgttccgcggaattactcggtttctcagtcccatcaacgcttcttctcgttctctccctcttatcaacgcttgctctcgctatatctgtactcagcttcggcatctctctttgatccgtgcttgttcttgatttatctctctgatctgtgcttggtcttgcaggttctctaatatccgtactactccttgccttctctgttagtggcaccggtccatttctaagtatggcgacttttcaatcgccgatacaaattttcttagatgctttatgtattgcggatataac

SEQ ID NO: 27822 - DNA, 114 bp, Arabidopsis thaliana columbia
ttttgggaactaaaaaaaaaataggctcacaacaaaagaaaaaaagtctagaatagtcctgatctcgataagatctcatgagccatagttgtcaaagatttccatggtccacaa

SEQ ID NO: 27823 - DNA, 524 bp, Arabidopsis thaliana columbia
aaaataattaaatttgttcaaccgtcatcttcttcaactgatcttagctcaactaacacactctttcttcttggcgtcaattcaatcaaccaaaacctttttctcctatctagctcacgctttcttcttcttccaatggcgtcttctgcagctctcggatctctccatcgtgagtctcttgctctctcactctctgcgttttacttattctgttgatttcatgaggataggaaaactagaaatggaggaccatgagtaaaatttcggaaatgaaaggcatagattggagctatccgttagtgacgttgttgcttcttagagtgtaatttagcgacttaattaagtttcaatctcggatcttgtgtgtctaatttgtatcaagagatgtttcagctagaaaaagtgaattttatttgttccattttacagagactttagggtcagccattaattcacagagtgaggttcactcgctttctggaaactggtctgcatctggtaattcatgtgtgcacggtggagat

SEQ ID NO: 27824 - DNA, 580 bp, Arabidopsis thaliana columbia
ttttcctcagagagattgaagattcttggctgtcttctaagtaaagaagcaagctgagacccaacaattccacaggtttcaaggtatgagatgtttggtaagagaaacaagttagggtctctactgagaagaagccaaccacatctactaagaatgacaggaaggtcttcatgttttggggcaacaatcgatttcagaatctcaacggtaggaatcaatttcttcactagacttacaccaacgactgatgagttttgagagacgaacttaccaagaccagagccagtaaatccaatatctttaaagaatcgaagtttgggttctagaattttctccacgttgtagaacatcattcgaggatggacccggatcgatttctggatctgggtatcggaaaaactgtaacttttaagcatttgaatcactgaccgaggttgttctagggatttgaggttagggtacgcattgcgatggcaattgctagaggtttctggaacccattgtccatgagaaactcgacgaacgctggatttgatatcgaagctggtgtcgcattcgaagagaaatgatgcaacgagag

SEQ ID NO: 27825 - DNA, 585 bp, Arabidopsis thaliana columbia
acagagtgctctaacaaaggaaccaaagtagctcaattactcacactagaagccgaagacttgtgaaactgaaaagaggtgatggactgagcaacttggaagaaagtaacaatgtcgctattttgaatggagggatgctccttttcaatatcttcacataatgactgcatcagaactaagagatatggtacgctggcatcagcatcagcatcaggatacttaaaaccaagtataaacaaaagaggttgttatattgtgtcatctaccattatatccgcctgacataaactgattgatgaaatcatgcagcaacttcaaaactttgtcatttgtcacagacattggtccatgttcccagacaatcttttcggtggctccacgaccttgctgaggcttaagcattgtgctttccgtagtagaaggtatccctttagtacagctttagtgccatcctatcaaaaatctcattcaagttacataactatttacataaacctagaattttaagcatcattgcgagatacaataccatggtaacccgggtgaatgtccaccaaattgtgaatgacgctgattcatattatt

SEQ ID NO: 27826 - DNA, 360 bp, Arabidopsis thaliana columbia
tcctcctccgaggtggagatccttccgcttgtatcgccgtccgaggctgggccaggttccaccgagggtcgaaacgacgccgagggtgctgctgctccctctaccgatgtccgaacctgcaggaacagtttgtctgaagtatgcgtatgtgttttgcggccgctggggcctaagcatgttaacaccggattataaagctgcgttttctttcctcttgtttcgagtatctgcgacttgttcgtcggtagcagaatcgcttatccgagcgagagttacttttcgcggaaggtgatgaatgaggtatccggatctcggaggcgtaggagtccctcgctcggtcggccttgccgcttacgtgta

SEQ ID NO: 27827 - DNA, 546 bp, Arabidopsis thaliana columbia
taagaggaagagaaagagaaaacagcatgtgtattgccgtataccgtaaagttttgagcttgaatctgtattgccgtgtgatactgtagattgtttcacctttgaagcaacaccttcaagagtcaaatccttttctttcttattcatcttcccttctttttccggaatattataaacacttttgaaaatgggatcacaacatttctatgtgtaccattgtgaacaaagaatcagctagactaaaagctcactctccttccacaaacaaaactttcctccttttggttttggtatctgtctactttcttcaatcaagatttcctcaaagttatggtgtgccaatcacctggtaagacaagatttcgaggattgaagtacgagaccggaaacgctaacgaatcaacaattgtagtgagagttattgaatgctatcaaccgatggataattgccaggtttgtaccagacaataatgctcttgttatcatacttttagcttatatagttctagtcttctaacactgtggttttgtgattattctttgtgt

SEQ ID NO: 27828 - DNA, 555 bp, Arabidopsis thaliana columbia
ggtttgataacaattacctcggggattgactcggcaccggcactggtttttcctcgggattcggaaccgtcgggaggttacttgaatcatcaccgtcgtagctgacagtatctccgtcatcatatctgaaagtgggaatcacaggagaggtgaatcttcgatatgagtttgttggtaacgttttggatctttggaacagagaggttcttctaggggtatgaatcggcatcgggttgaagtaagtaaattgagaaacagagatcagttacaatgattgaaatttggaacatggaagaagagagatctgagagttagagagagcttcttcgtcagtccactgtttgtttagctctctgtctctttttgttacagtttttgaataaacaaatgccaaaaaagtaaatggagggagaaagctttttgatacccaatttagaaagtatctttcttctatcaaatttattatatttcatttgaaatgatacgtaaattagtaatttttctattgttatatacaatcctattatataaaacttaacaagacatggtttgtgt

SEQ ID NO: 27829 - DNA, 532 bp, Arabidopsis thaliana columbia
cttctgcagctacatttgtctctgcagtcacatctgcaaccatatgtgacacaagcctatcaatatttgacattgtcgcttcggcttcaccagcatctttggcttcgacagcatcttcagcttcagcttcggcatctgcaggaatcgctgttttaaccgttgaagctgagggcagtgtttgttcaattgcttgcattacatatacaatttgccatttcttttgctctttaactttctcctctatagccgaactggttctttcctctctaaattttttgtcagttctaatcccagaggacttaatagcttgaagggtggggattcagtcattaccttcagattttcggctacttcgacggcagagggcgtcgaaggagcttcttctcctatctcactggccttcgcgtctgaagagggcactgtgtcaagctttcgctttttagaaattgttgcctttggtggtggtgctgtttttgttttcttcaaaaaaatttcatcttcttttactaaccgagcagcttgcctatttagg

SEQ ID NO: 27830 - DNA, 544 bp, Arabidopsis thaliana columbia
acgataatcttacagatccagaagaagatcacacatggtttttgtataaattagacaaagctttacttgcagaacagagcagaaacagaacatatattctctgtctttttttgtggcaaaagtaaatggcgagaagacaactcttttaccatcgaatgttcttggttttagctcttctctatctcatgatctcatggaagcctctcctaatcactgcaagtctgtaatacctctctctttcttctaacctcctcaagtttctatgttctgtttctttcttgtattaatttcttattattgcaggacctgagaaatcaacagactttgaaaccaagggacaggaattgaatcgtcagattagccatctggtaagaatctactccacacacacacacacaatgtgagcaaagatcaagtatcttctgtattttgactcttgctcttgctttctatttgtatggatgcttcatgtcttcatagggacgtattgaaaatgatcctgagagaagaaaagggacaaggaggatgatgaccgttgaggata

SEQ ID NO: 27831 - DNA, 478 bp, Arabidopsis thaliana columbia
attagctctagaattactactttttatagttgttgtgatttgtttttataattttgaaaggtatgtttacttttggttaatgttttatgtgtaggaagcaaacaatgaagattcttctttcattgcggtgatgaaaaaaactcatcaaaaagctgatggaacatatgttgatgaaaaagcaagagtaattgctgaaaagtatgatgaacttttaccagaacgcatggcacaaatgcagctttttgatggagagaattcaacaatgaatccccttaccatagaggagaaaaataaaatctatgttcaggtaatttttcttatcttacatttgtgttctttgtaaagatcatactttaatcctctataggtttagagacttgatggagttttggagtacaaactgattcttactaaacattttaatttttaaaatgtcattgttcatgcacgtatatttcttgtaggttgctggaatatc

SEQ ID NO: 27832 - DNA, 508 bp, Arabidopsis thaliana columbia
gaaagagaacctgcgaatcttggcctttaagcaacctttggctgaagcaattcttctatcctcctcgcctttttcatttatttatcaaatatactccagtttattcttttcttcccactttcaatgcctctcatatatgtaaaacaaatcacagtataataactctcaaaacatgtaacttcgattcctatctattagaaattgacgagagacatgtcgagaacaagagtgcgagctgtgacccatcaagatcttgttccaaaccctaaaaccacagatctcagcagctaaaccggtattttcatcgctgttttgacaataatctttggcctcatcctgctttgttctctgcctctatgctgaagccacaagatctcatgtacattactatacagggatgtatataaactttctctctatatggtttcatcatttatattttcgtaataattcagaaatctatattgattcatgtattatcttaattaccatatcgttcgattataat

SEQ ID NO: 27833 - DNA, 470 bp, Arabidopsis thaliana columbia
cgaagtagcaagttcgtttaataaaaaaagtcttagctagctttcgatggtttttcttccaaaaaggtaatggagaaacgacaatttcaatgtctcacgattgaatcattcacatagtcacatacagttgctttggttaaactggatccattctatgtatatacgctatagtaccgattaattacttcatttaaacaaagcattgtttcatagttaatttctttgtaccatgctatacattaatagaaatgatatttgaaacatgtagtttcttctacggtaattaatatttactaaaaagagatggatacatgaggtttaatttatgaaacctaataattaagtttcaagttgctccatatgatcatccttaccaccacgcaagccgtttacctcctcgcgctccctccggtttatgtcctggctttttcccggtttaccccccatgctccccgggtttatctccggtg

SEQ ID NO: 27834 - DNA, 565 bp, Arabidopsis thaliana columbia
  unsure (1)..(565): unsure at all n locations
tgccacctatctgctttttcttttatatatactgaaaagtgaaaagggatgaatctatgaattggtagctttataactaaagaacgaattaagcaaaagttgttttcttgtttaacttagctaggcatctacctgaatccaaaagagcaacttgttttgttttgtactaataagtatcaacaagtcttgacctgcacatgtcaagtttttgacttgatttagagcagcttgtttcttgtgtgtccttggagttctctactgtttctatagctttgaatgagctttccatttgaccacatctcaaaaaatttggtaatgtgccttagaataacaccgagtttggtaacacagctggaattggtgttttgctgtggcataatgggagctctgaaatgtcttcccagttaaaggtgagtataaatgtttgcattgtgaagatttgtattaactatagaacattgaattgatggtgttaagtctnacacaagcgtgcttacaggtttgaactgtttattttgtatgttgaatcagagcttagtttataggaaccagagtatctacttag

SEQ ID NO: 27835 - DNA, 442 bp, Arabidopsis thaliana columbia
tgatttaataagtaataaatgagtagatgtaaaaatcacctgaataaaaaaaaatgaaatgaccatagtaataataacggttaaaagcaacgagagaaagaaaattaggattaaacaccatgagattgaatactcaatgtctcatgtaatgatttaaaaaaaaagaaattattagtatgtaactcatgtaacaatcgtataaatagcaaatatttacacagacacaactcacacatatttacaagtgcttttatatcctttgaccattgaagttactcaattactgaaagaaaaatggaagatggtttgctgtatcaccaacatttacggtatcaccaacgtttacggcaagagtcctaaccttatcactttgtctctttcatttccggtttggactcatatatcctttctgttttccctttctttttctttccgttttcgt

SEQ ID NO: 27836 - DNA, 485 bp, Arabidopsis thaliana columbia
agttccgagttccaatcctaggcaatgaataataattctagaacatgtgtgtttggtacacatcataacactagcattcctaacatgttttgtggatcaagaacatgtgtgtttggtcattaatgggctgagctaatctcttaggccatatagagtcactagtttatttatgaagacatgtttggtaaaccaaatagaagaaacatgaacctcataaatcatgcctcttgtcttggtggtacactttaagccgaagttacaatagtgatgtgaaagaaagaaaaaaaacgaaacttaaaatcagtaaatctttgtagttaatcaaatggggtaaacaataagaacccttacaaatcagaacaatgcaaatgttatcggtgagcagtaacaagcgtctcgatgaatcgtaacccatcaaaccttggagcaaacttctcatctcccccatcttccgacgaacccttcttcttcctctgttttccttt

SEQ ID NO: 27837 - DNA, 492 bp, Arabidopsis thaliana columbia
aatctccgccataatcttcgttcttgttctccgtcagcatctaaaaaaagtcatatatatttccaatttggttataaacttcatatcaaatcattataatctgaaacttgaaacaaaaaggaaatacagtaattctatgacttctatctgaacgatttgtaataagacagaaccagatcaaccaaaaatattggttcctttgaaaaaaaaaaatgatcattttaagaaaataattaagacggaaacgttataaatcaaacatttttggtttataaaattgaagtatgaaccaacactaataaatttaatgactttttcccctcccatattttaacttcttaagtaacctgggggtggtgaaggatagggtctgaagtgagagaaagatctaaagtcggcggaaattcctctgagatggcgccacttcgtctagttcttgtctttttcgttagtttgcagagaacaaatgcgtccttcaaatgattatatata

SEQ ID NO: 27838 - DNA, 735 bp, Arabidopsis thaliana columbia
tcgttagctctgtagagattacatagtttatagctctgtaaacaaaatttcctagtctctcttaaactaataaaaggaaacctaattaattcaaaaaaactaaataatgttaacttcttcctccttctacgagacttggcttcacatgtgcaaatcatgttaattatgcacatgatagttacatgatatcttcttctaaccttaaacttaaatatatatactttcaatctttcatataccaagattcgtggctcctctcactcgaataagctctgcctctgcgattatgtgtttcgcttattgaatcacagcatttggtgagaatgcaacaacattattggtgaccgcgcgcgacacttcgtgtctcactacttgttcagacacaaaacaaattactttttcttcaagaaacatagtgcatttaacgaaacggcaaagatagatcacacatttcttcaagatacttttgaacctaataatgaaacataaacgtttcattgttcttttcttttgctgagaagttttgggttattttcttttgctgagaagttttgggttatacacatgggcggaggtatattgtccacatggagtcaattaacctgtttgaatttttagatttttttttatttacttgtagttttagaagcaaactttataaaaatagtttaaaatgtgtttattgccccataaaatttgtgtaaaaatagatctctcatcctgtgtaagagttgt

SEQ ID NO: 27839 - DNA, 382 bp, Arabidopsis thaliana columbia
ttgaacatgactacatggtttatatagagtgccaggatattctaggatcatttttctttgttgtcttcttttgtttccagcccagtgtaatgacattgtctttggatttgggtccaaggatgatgaatataccctgccctgcagcagtggctacaggggaaacatcacagccaagtgtgagtcctctgggtggcaggtcatcagggagacttgtgtgctctctctgcttgaagaactgaacaaggtgaggcatcttcactgtgtagacttgcctggtccttgagttcaaaagtgccaatacccagtgagcatggctaggtgcagggcaagtatacctacgtgcatcattgtccagtatgcaaagagcacgtatgacatcaga

SEQ ID NO: 27840 - DNA, 551 bp, Arabidopsis thaliana columbia
aagtcggtgttggtttcgtgagattttggctttaagactttcaagattattatgtggatacatcaataaaccaacttttgttctataatctttaaagtatttttgtacaaagtagttggaaagtttggttgaattaggctacggacaaaaagagagagtagttggggaggtaattacgatttcaatacattctttgcctcaagtgagatttgattttgttgatttgagtagttttaagattgaaatggatcaacctaaaaatcggtgcaacgagcgccactggttacgcacgacataacctctataaggtcactttctctgtaactagaagcctctcatgggattgtcacttgaagtcttcttatgacccaaccaatgtcattagtggttttgcatctgtttccacctactcctaactgtatttattgctccccaacttaatgttgcaccttctattaaatagcccacaacgaatcttttaaaacctaaacctcattattgtcacagttcgatgtccttttagtgtttcttattaaatgtttgtgtttata

SEQ ID NO: 27841 - DNA, 644 bp, Arabidopsis thaliana columbia
  unsure (1)..(644): unsure at all n locations
atcccgcctttaacgaaaagaaaaaaagtttttttctttctgtcttttttctttgtgtgtgggagaagaagaaggtggcggggcttttgaaaggtgagagtggtaagctttttatctttgagtgagtgcgtgcaaataaagagatttcaactttggtaaccgtgtctgatccgggtttgtttggttttacagaataatatttatacacgaaacaatctgattgacaatgatttgtatatgattccgttttttattaataacatactatttcacatgaaattcaactgaaagattttaaatcagtttttattttgtattaatttctcataatatatctccaaaactatatactatgcacaactagcaacttctgtagctaatgaaaaggaaacttctacagctctttaaagggataaaatacaaataaagttcctctgctttaaaaataaaaataaatcatttgattgaaaagagatccaagctccactatgttgatcatcaagaatgtgaaagttgaaaataaaagagaaaaaggatgttttaaaaaggttaatgatttctctcttttttttgtctgagtggttttntttcagtctttttcatcgtaaaattttaaacagtattttacaaaaacatttaactgg

SEQ ID NO: 27842 - DNA, 505 bp, Arabidopsis thaliana columbia
  unsure (1)..(505): unsure at all n locations
aaagctgtagttggagggtgtgcagtccctaataaaaaaaaatcacatttttaaccttcaatttcaaaagaattttactaatactataaactaccaaaataattttattaatattttagacatccaaaatagttttcctatttacatcgtcataaaagatgaccgaacagtaacggaacaattaatttatgtttgtttagtataattgtttaatttaatttaatttttaattaataatttatttatcataaccaaggangatctaaaacaaaaaaaaaacttttttttcatctactcaccgtctgactatgaaagttctagattaacctttaaaattagagactggagcacaagagaaattaaagtataagaatagaaacaaacaaatgtagaatctgaggtacaagaaaatcttaaaatagaagaataaaaacaaaagaatatcaaagcttagccaaaaaataaagcattcactctattagaggaatctattgggtgagactga

SEQ ID NO: 27843 - DNA, 516 bp, Arabidopsis thaliana columbia
cgtgttcgctcagatctctctcgcgccttttctttaaaaggttgcgtccgtagatccaatcaaaatctcgttttgacgaaattgcccctgccagaacttacgcttataacttggtttcttcagttggtatgaaccggaaaataactaaaccggtacacatgtgacccatggtccgaattcccacctcttcttatgaatatcatgatttttttggattaagagtctagttcttttgtttttctttctgtaagattttaattgtaaatttataaatatgctatatgtattttaaactttcatttgttcatgtattaaagtctgccttgtgtatatatcaatgcattattgtgtatatttttacaaattaatctctacaaaattatgtttaattagtgtacaatatcttatccatgcgtctatgatgtatcctccggcagattctctaaagtcgaatgcctttgaaggttacattacatgaatactttaaaacctaatgagatattatgttgagaagcg

SEQ ID NO: 27844 - DNA, 132 bp, Arabidopsis thaliana columbia
caacataagaaaatgagattggactatgtagttaataccgtactaaactttcagacttttcaatactttataggagtaacgtaatggctcagaatccaagatactgatgaactaacgtagttaagagatacg

SEQ ID NO: 27845 - DNA, 471 bp, Arabidopsis thaliana columbia
ggaagtattttgctaatttgtgtgtcgaatttggctagttagctaattgactctatgatttttcacctttaaataatttgaactttttataattgtcaaattgaaaagtcaaagtttttccaatatgtgaacaattagatattctttttttttatggacatggattttagatattcttattatttaagacattcatagtaaaccatgattcaaatgactatggaataacttgaactcaataaaaaaacataatagtaagataaaaaaaggtcattgttcttttttttttttgatttttttctctttcttaataattctcttttccttctttcttcaacttgccgcaggttttgtgcctcgtctccgaccgacgcgtgtgggccaccatgggcacggcgttggtcggttttttcagatattgtttagttatctagtttggttttcttgtgtggagagatctgtggattggtt

SEQ ID NO: 27846 - DNA, 542 bp, Arabidopsis thaliana columbia
ccgcttcgcttctcgtctctcttatcagtcttctcttttcacggctacaaggttagtcctaagtttcggctctgttcttgcatcagtgattggatctctactgccttttaatcaaatctcattgaattgatctgggttagggtttgggtcaggttatcgaatctttctgtgtgattttgattctatgagatgaatttagggtttgggcaagtgttttctggtctatgtagcttccatcctgttctgagatatctgattgggtttttcggattctggtgatctctgttacaaactcggttctctgtgtttttcaggctaattgagagtgtcccttgcgttagagtttgttactagcttttttcgtctgaaacatggcgaattttgccaaaccagagaacgcgttgaagcgtgctgatggtaagttacgaaatgttttcgttttaacatccatttggtcaaatggatgtggttagggtgtgtatgacatgagagtgtgttaaaactgtttttttgtgtgtgtagaattgatcaaatgtggacag

SEQ ID NO: 27847 - DNA, 906 bp, Arabidopsis thaliana columbia
ccatcagcaagcgtccctttcatctctcgcaaaatagtggcatttgtctccttgtattcaactgccgtctgctctttattgctggaatttgattcgaccaatatgttctgtaagcttgaattgttactgagcggatcaaccacgtcttcagcagttctatctctcggtagacagccatccgtgatgttctgtttggtactggactgtcttgtaaggcattcttcagaggagttgagcagatccaaaaatgttttttgtaaatgggatgctttattcatctcatcttgttgattatgttgggtatcgtcctggtgttcttggacggcgcttgaggaaccggacaatcccattcctggtaattcatgaggcgttgatggtatgatctgacctgtgaattctcttggaacacttccaccttgtctgaaaaacctgcgtggtacatttttgttctttactctgtcaactcttggtgagatggacatccaagaataaccaaggccttcaccttgcattccaaaatcctctatgtctagtacatgtggctgtcgagtcgcacactgctcatagctgctggaaggagttgtttgccaattagtatcatttcttggctgaccaaaacagacagagtctttccaattcattgttttttcaagatcaggtttcttctgagcgacatttgtagtttcttgtttctgaacatcaccagatccttcatatagatgcggtctctcattcccttgaagacaaatttcatcagacaagtttgggccccagtttgcactgattgtgatgtccactgacagtttttgtttcacactggttgtaggaactctgcgtctgatttggaacatgacaggatccactctccacacgactgaaatatcgcggataaaagaacttgtgatg

SEQ ID NO: 27848 - DNA, 460 bp, Arabidopsis thaliana columbia
cggtcattcgattgctagaaaagaactagtcaaagcttcatatcgttattgcattactgtcatcaccattcataagttgtaagaagaatagcaaagaggaaaatttgtatttttcatcaccaaaagaaagatttgcatacctttgatttacactctgcaattgtttaaaaggggactactgatgatatttttaacaagctgaatttagtacaatatagtgatatatacaccattagcagcattataaagctactctcattaaactaagaatgaaggaaataataaacttaccaaaatttaaaattggtttaatatggttggccaaaaggttcagatgctctgtttcgagtaaaaatcaccgccaaagtgataaaacatccctttcactgtcctgcttgtaatttttactctcggcagaagatgacatcattcatcaataacatatgttataaccttgagt

SEQ ID NO: 27849 - DNA, 247 bp, Arabidopsis thaliana columbia
ctgattgtatctctgccagaggtctcttgagatattccctacttatctgttgtatctcaagtctaagtgtaagttgatcatagaatacattgaggatctatcaaatgaggtcagttccgcctgcccaactcctagtgctgtctgtgtatttcactcctagcactcatcacagttgcagtattacatttctacaactttatacatttgtacttactttattaatgtcagtttctttcaatgcgctgta

SEQ ID NO: 27850 - DNA, 545 bp, Arabidopsis thaliana columbia
ttattatttttctttcgcaaaccttattcttctctctcattcccacgacctccacaactccacttcctctacttctgaaacttccaaaatctctatgaatataaaatctcaagaatcgtttactcatcctcaagcatccattattccgagcaatcaactgttttttctcatcttgaaggtatcaatttaccatcttcaatttctgtttttaatttttcatagatctgcaaatcagataatatcttcaatttctgtttataatttccatgtttttgtttgatttcttcttctctgtttatacttaatcgattgcaaacccttgaaactaattatctctttgattttgatatttaggttattggaagaaaaaaatgccgctggaaataacaccggtttcacagctgcattctcacctgtcaacgtgcaaagtgaaagttcgaattgctcggttatgggcatacacaaaaaagacagacccaaagatattatgggaatagccttctattggtggatgacaaggttctgtcatctagcttatatagaaa

SEQ ID NO: 27851 - DNA, 375 bp, Arabidopsis thaliana columbia
tttttttgtttttcctttgtttaatttctgtttcataattgtaattgtaaattaaccaaaacaaattgatcagaaacctttttcctatcgaatatttatcactcgcaagcctgtgagttgtgactctgtaatcacttccttgttcttgtaatttcagtggttaaggctctcctctattctgatgttgtcagcaaaagttagtttttcttcttctttaatgcgttaattacacctaaatctcttggtattaaacaatccagaaagaaataaagtttattcgttcctctatgtatatagtttcacatgcaagcatcactagtttgttctgacaaattgcagagttttgagttctgtttttagtttttccaaaggttt

SEQ ID NO: 27852 - DNA, 520 bp, Arabidopsis thaliana columbia
tgacgactttccaccgtccagttccggccactgttgtcgacgttgttggaagtatcgccgcagttgaagagaaagacatcggtaggatggtacgccgccgtaactccagccgtaacagagacgagaacagagagaagaaacaaaacgttacagttcatcagattttttgtaagaaggtggttaaaggatgagtgcataacttaagctgaagaagtcatggatggtgggcgagtcaatgggtcaaccgttgactgacaaagcaaaacaaatagtctgattcaataattgtctgaagtgctagtggttgtatgtgtgatggaacgatatgttatgtttctcttttggcacaatgcttaagatgaatatagtaaagtctaccgctccaacaatatgttaaacagtatacaaatttcaaaaataatgcatattttgctatgcttcataaacatagctacatagggttgttctttatgatgttgctagcgactagatatagagaagagatgtgatagaattagat

SEQ ID NO: 27853 - DNA, 494 bp, Arabidopsis thaliana columbia
caatgctcagaatgttgtcagtaatttaccagtcaggaagccgtcgaaaatcaccgtcgaattcttggcggatttagttttccaacgctttagagctgacaagtgtcatctctccataaatagtcagaaagaggtcttttcgatggttttttgacagatatgaccgtcggaaagatctctgattgagaaaagttaaatatttcaatccacaagtcaacatctgattaatagatttaacacgtgtcacgatcatagtaattactaactttgaaaatcaagctttatataataagatgttgaacttacttttgtcaaaataactgaattttttaaactattgtgtaaataaataaatagaaaattattataagagattaattaatatatagaacaaagagaagaaacaaatttaaagggaggaaaagacatgagaaactttgaaaaagatcaaaagttaaatactaaaggtcattaaaaagagggacatttgagtc

SEQ ID NO: 27854 - DNA, 853 bp, Arabidopsis thaliana columbia
gaaaagtaaacggcttctagagggactatgaccgtttaggccaaggaagtttgaggcaataacaggtctgtgatgtccttaaatgttctgagtcacacgcgcgctacactaatgtattcaacgagttcacactttggccgacagagccgggtaagttttgagattccatagtgatgtgaatggatcattgtaattgttggtgtctcaacgcagcaattcttagtaagcgcgagtcatcagctcgtgttgactacgtccatgccctttgtacaaacagtccgttgctcctaccgattgaatgatctggtgaagtgttcggatcgcggccacttggatgacccaaaaaaacatataattcaaaaacctatagcgaaaacaagcaaagagtggatgagtaaataaatggcattgttgttgttgacctcactcaatcacctagtctcattctcactcactcgcttgccttcttcttccgctcacaatctcttcctttctcgttccttctcttcttcgatcagacgattcaatcgcttctcactcaaaccacttcgctccttcgcatccatgtcttcttcttcccccgacgctgctcagactcctctaaccaccgctccttatggctcctggaaatctccaatcaccgccgacatcgtttccggagcttcaaagcgtcttggcggcaccgcggtcgattctcatggccgtctcgtcttgctcgagtctcgccctaacgaatccgggtattacttcttcttcttttgattgattttgaaaatgaaaacgctaatttgattgcgagcttgatatgattgaaggagaggagtttggtggacaaggagaacatcaattgata

SEQ ID NO: 27855 - DNA, 648 bp, Arabidopsis thaliana columbia
catttagttggttctggatagcagaggttgcagaaccagttgtcggaataagaggagttaatacatggtcgtcatcttcactcgcaggaggaatttcgtgagccgaggatggatctagatctagaattggagattggtgagtaacattcacaacaagagcattacgagtcggaatcggatccggtgggtctggagaaggaagaaccgaattagaaatcaaagaagacattacagaaaagaagaggggggagaaagaggatattctcgacggcggcgtgaggccacaccgtcggcagcaaagttaggataataatcgccttattatcgtcttgacttttttgcctcaagtatacagatttagcttagatgagtctacacatgctgatataagaatgggcattgttaagttttcgcttttgactaccttgtagcatcaaccagagccgtcatgatcactttcagagggtcaatttatgattccggctttcatctttgcctttgtcttagaattcgaacctgggatgggatcatcatagaacatgcagtcaattggcttgcgtaaaaaaacttaatgacttgagttagctacgaaagaaaatgtcagctcttaagctactgaaagggaagtaaaacctagatgattgggac

SEQ ID NO: 27856 - DNA, 551 bp, Arabidopsis thaliana
agtcaaattttcaatttttatgttggggtattcatgagtaaagatagattcataaaggtctagtctttttgggatctgatagaattcaaagtgagaagtcgtttggtagactagtgtaggcaaattcggtgaatgtgatataagcttgttacaggaaaaatgggaacttgctatatttagaacatttgaaatttaggtttttgtatgacataggatccaacaatagattaacgaatgataactgttggaaagagccagccttgatctattgttaagagaattatgacccttgaacttatcttccaaccagcttccttgtgatttgagagagaaaccaaatctgattttcatgaaatccaaaacagagctccaatgtcggagctgcttcctcctcctcctcctcctcctcctcctcctcctcctcctaggagggattcaggatttggagatcctgcattggtattccctgagtttgctgccaaacaatgcggtctcgaaaaagttatagaggaagaaggagaaggggaagatagtagctctgttatacatat

SEQ ID NO: 27857 - DNA, 567 bp, Arabidopsis thaliana columbia
  unsure (1)..(567): unsure at all n locations
gagaggatcccagattatttaccaaatgaaaactatatggctaaaaggctaaaactactaactcattgtgggcaaagaaacacgagcttatggttgaaatgtcactttcttccttgtggttgggagttaattggtgtatgaccatccaacacaatcaaaagatacttttcttaagaaagagaaaaactattttaatagaagaaaatgataaatgaaagagatatttatcaaagtgaggagacatgagacctgatgctatcttcattatccaaagaaagaaacaattaacataaccgaacaaacatgtgacgctgtcttgaatttaagaagactacaagcgatgagcaaaagaaggctttattacctcataaagaatggagacagtaggaaactaaatcattcatagaaggcttcatcctccaacaataccaagcttcccagtgattttctcgaaatcattttctatacaaaggcaataaagacttgtgtggaaaccatggagaattaaaagtcacaacaacgtcatgaagtgggnaaataaaccataagccaagaaccctgtacaag

SEQ ID NO: 27858 - DNA, 742 bp, Arabidopsis thaliana columbia
gactctagagaaaattaaattgtcactgtttatttaattattctattgcataagaattctcaatgtgtggaattgtaactaagacttctactattgacttctaaaagacaaaaaaaaaactaaatgaaaatgaggaatgaaacatatttctttctgacgaatgatgataatgaatgatcattaaacaatgatgttaccttttaaaaatacagtgaataattaataaattaaatgtcagttaaaaagctaagaaaactaattttacatttgatttgaaatagaaatttatgaaaaataaaaagttgaaatttcatataataattcttattattttaatataaaattatagcaataattaacaatttaaaaaattagtataaatttcttttggaaaaatctctgaactttatttcactttcatataataattttacataaaatcatacaagttagcatgaaattatttctcaaattaatttttgtttagatatatattatattatgagtttaatataatattttaatatttatatacaaataaattcaatatggtaatgtatgctaggcgtgttagctaggctggtttcacaggcatatctagctttggctggattacatgttagatctgtcgagcccaatatgacctcatgagtcatgagccattcacaattggaccattaccttttttttcgctagtttccttggaaagtaattaataaattggaatattctaccatattca

SEQ ID NO: 27859 - DNA, 541 bp, Arabidopsis thaliana columbia
tgaggcatttacttaatgtaaccgacgaagagaggcaaataaggcgtgaagagatattatctacaaggttaacagcattctctcatttttgctttagcgtatatacaaatcaatttatacaactttttcactttccacataatggtatgccgcggatatcctgtggggatttatgaaatccttggggacaatgttgtgatctgagttttgtagtgttaggagtttaacgacttctttgaatattaccaaatagccagttgcaattcttcgacatagttattatcaaacagataagaaaagtaacttccattttatcctttttcagtttgaaggacttcaaggaattcgcagaggcaatagactctgttagtgataaaggcgttgcagtggccgtggcatcacaagaagacattgatgcagcaaacagagaacgctcaaattttttcgaggtgaagaaagcagctctctgagtctgagccctcttagaaagtagcttgtcacaatgaggaatgactcttcttaggttcacggtacgacgcat

SEQ ID NO: 27860 - DNA, 1062 bp, Arabidopsis thaliana
gatgatgatgaaccaagtttcacagaggaaggtggtgatggtgttcataatgaagctaatagatcaactaaaggatctccatggcaacgagtgaaatggactgataagatggtgaagttgttgattactgctgtttcttatataggagatgattcgagtatagatagtagtagtagaagaaagtttgctgttttgcagaagaaagggaagtggaaatctgtttctaaagttatggctgagagaggttatcatgtttcgccgcagcaatgtgaggataagttcaatgatttgaataaacggtataagaagcttaatgatatgcttggtagaggaacatcttgtcaagttgttgagaatcctgcgcttttggattcgattggttacttgaatgataaagagaaggatgatgttaggaagattatgagttctaaacatcttttttatgaagagatgtgttcgtatcataatgggaataggttgcatttgcctcatgaccttgctttgcagcgttcgttacagttggcgcttagaagcagagatgatcatgataatgatgattctaggaaacatcaaatggaggatcttgatgatgaggatcatgatggtgatggtgatgaacatgatgagtatgaggagcaacattatgcgtatggagattgtagggtaaatcattatggaggtggtggtggtcctttgaagaagataagaccaagccttagccatgaagatggagatcatccgagtcatgtgaattctctggagtgtaataaagtctctttacctcaaataccgttttctcaagctgatgtgaatcaaggtggggcggagagtggaagagcaggttcggtgcagaagcagtggatggagtcgcggactctccagctagaagagcagaagcttcagatccaagttgaattgctggaattggagaaacagagattcaggtggcagaggtttagcaagaaaagggatcaagaactcgagagaatgagaatggagaatgaaaggatgaaacttgagaatgatcggatgggattggagttgaacaaagggaattgggtg

SEQ ID NO: 27861 - DNA, 513 bp, Arabidopsis thaliana columbia
ccaaccgaggtatagtaattcatcattatatgattttttgtcgcaatgaatatggagttatgagattgtgtatcaagtataagcaatgttggttacaagaaagtgttacgttgattcatttgtgcagtgtaagtctctctattgtttatttcactctttcatatattaaagaaaactagaataatacttacaacttgaagaactctcttgtagtcttgtgtcattatgatcgtgttggcagtgaaacgcatattttgttgacgttgccaactacttcttcattctcaactctctattagttctattcaagattttaacaccaagtttttgaaagataaagagtatacacaactctcagtactaatggatgcaaactaaatgtaactgatccgaatttaaaccataccaaaattattgatttgataaaaccgaatccaagagaaaataaaccggttctgtttttattttttccatatcgaaagaaatctagaaccactaaaagagttagaaggt

SEQ ID NO: 27862 - DNA, 474 bp, Arabidopsis thaliana columbia
attctcttacaaaaaatattagcatgaaagaatggcaggtttaccttttctttacagattagctccacaatgtgagattttttaattaatacaaaagttgaacgaaataccaaaatatgtgagtcaatatgcgtaattgattgactcacattgcttgacattagtttatgaaatgtaattaatctattgattttagtccaagatttttcaaaatctatagtcatttgagtacttccttaattgttacatttcactaggattgctttccaaatattcaactttcagattcttacatcaatatgttgaaaaagctacaccagtaaaactagtttcatgggctaactgataaatctcacaatagattttagtttatatagtaaaatatatatttgataaatcttttaaatgtgcacacaaaaaaatcttttaaatgtgaatttacagctaaatttttttaaaaacatttgcggtaat

SEQ ID NO: 27863 - DNA, 158 bp, Arabidopsis thaliana columbia
tcacactcccattaatcaagttataaattgataatcatctcggttactaactgcgtatccatcttgttgtctaattgatccaggtacacctctatcgtaagcgaagtcgatcaacaggagtaagaacctccgttccaacgacaacatccaccgcatag

SEQ ID NO: 27864 - DNA, 559 bp, Arabidopsis thaliana columbia
  unsure (1)..(559): unsure at all n locations
tgactactggcaggatcaaccaggtagcacgtcctcgcagacgggccagcgccggcctccgcgcggaggcgtcgtgccgggctggacgtcgttcgttcgggcggaccgattcttgggcgcgtgacgcaacgcgtctccggccttcagcgtgagcacatccgagaccaaaagcgccacangtgtgtcctcggtgccgccggccataggcgacggcggcacgaggcaaacgccgcgggcgctctcgagccgacgagccgcaccccggggggtgagctcgacgaaggcaacgtgtatcgagcacggcttcccgtgggacgggtagcagcacgcaagcacttctcaacgcagcaggcacaggatgcccgcacgagcgatgggacacgggcgccgggagtcggccgcacggagtcgggggtcctccaagcagtcacgggtccaagacaactcatgcgccacgtacgcgctacgatcgagccatccaaagcatccctcgcgctggcgcngtggtctgcttgcgaggacggcgaccgaagctcaccgagcgcgggagaaacggaaa

SEQ ID NO: 27865 - DNA, 511 bp, Arabidopsis thaliana columbia
taaatttaaaattagactcttccaatgatgtttcaacccatataacaacagaaaagcaaaacaaaaatatttaaaatttgagataggttcgaagatgattatctttggaacttggttttcttgatgtatatgattaaatttggtgcatatgtaattaagtgtgcactggaccaataaaaaacattgaaaccttatataatatatcttcttatgacacattattatgtaaataaacaaacaaacaaaactttaaaagcgtttgcgttcagcgttcagcgttcagcgtttgcgttcgacgtttagagttggcacaaaatccaccaaattaaaaccattcaggcggaggattcaatatatctcacagtttcactctcaacatttcaatatctctctctctctctgtgaagaacaaatacagcgtttcttctgcgattagatctatttcgatactcacgaggattgcctcctgaggagactacatatactaaacaaaatacaagctgaggagact

SEQ ID NO: 27866 - DNA, 501 bp, Arabidopsis thaliana columbia
aaaaaaattgatctctcaacatttatcaacctcaatgtaacacaatattctaagtttattatggtagaatatggtttaattcaacactgctttcttggaagatatatcagttcaaagctctctatcatccagatataaggcttatttatttatatttagggatatttataaccactcataatgacttttgcatgttacatgcaacgatccaatatcttgacagtttgtaagatcaaccaattcatcataatacataatatttaaaaaataatccctcacatgaacagtacattgaaattttgtcatttcgttgccactcgtcgatttgtaattaaaaacacataaaccaatctcactcttcacctataaaaaccctatcactatcttcatattcttcacacaacacatcaaaagcttgataaagagagagtttttagggttttcttgtacctattataagaaatactctaactgaaactttacttcttcatcaatggctta

SEQ ID NO: 27867 - DNA, 566 bp, Arabidopsis thaliana columbia
gataagagatgaaagactataatgaatataagggtaaaatagtcttaatatgaaaaatatggagaatatcatatgagatttttttattaggttagttacttaattattaaatttttgttggttgtacttacaaatttccctaaacaatttctaaaatttgcgtagttcagattctgaacccgccacattcaaatttttgaattgacaaataccactgcacaatagacgattttgtaattatgatgcctcttaaaaattaaatatattttaatgtttaaagcacatgtttgttacgttttaggtctgggccggccctcatcaaacatgcgactttcaacttttttcagtttcttgctgtgggtaattcatgtaacaccccaaatttgaaagaggggagaagttaatccgataatttaaaaactgtataacttcagggagatttctgattgattcaaaagtccaagacaaaatctctaaataaagaaaggttcagagactaaactgcaaaaacgaaaaaaaatgagggcactcgagttcatcgtccaaaatcagagggatagtttttg

SEQ ID NO: 27868 - DNA, 517 bp, Arabidopsis thaliana columbia
ttgtttgtggaggtcttctaagtcaagactcgtctctgaagtccgagctgcaaagacaagactgaaagacttaagttaaagccaagcaacatccaatctgtcatagcttggaataattgggtgaagtgtaaaaccaacaatgaatttaaggttgattaggatctaatacttcagttaatgttaatggttatttgtgagtttcatctaactaaactgaaactttaatttaggtacgaagtgataggtacagaagcttggggaaggctcaaataccacagagaagcatcagacgtggcatgacatgactagctcataaggtggtatagctaccctactggatttatttgatggaatctatgatagtttatgtacttagacgatgaatgtgttgtgttgtcaatcgtagaaacagaatagttctgatcataaacaggtgaccagaagcaacagtttgggtagctggacacacacattcagatggaagatatgtgaattcagaatttgccgagactattgt

SEQ ID NO: 27869 - DNA, 834 bp, Arabidopsis thaliana columbia
gtcttaatctaagtctttaattcaagtgaccaaatctcagtaaaccaatgtaacaaacagagaaataaaagcataaaaagattaggagcagtcctttaggtttccttggcgagaagcttgaggtagacatcatcggacttaagagcagtactaaagcactttcatttcacatgttattgttttgttcttttgcagtaacttagcctaataacaaagcaacacttccgattcaagttagtatttgtcatgttctgctattttatggcccttacatcatcttctttaatctttagtgcattccattgcaaatatacgcctcacaaatcaaacctcccaagtcagctaagtctatgaaataacacatagtaccttttatttgtctccaattgtacaacaatgttcttcaacattgccacagctttgcggatattctgcacaatcttttgtcgagtaactcactaacagaataaaagttcttaatgtctaatggattgtgattgtcatgcatgtgcttgtatacttagatacagaataacacaaacagatagctcataaaatcaatgcttcagagagcctccaaacaatctaagactaaattcagaaatggcttgattcataccttggaaagattttggagcttccttgatcgacttcactccaaatcggaaagattttactcctccatcgattctccttcgttcattcgacggtgctatagcgacccaaacagatatgtcggagctcgactccaccggaatttgcatttcgcctcagagcaactgtatcgcgaagaagagaaatagatttgacggagagaaagagaaaactctccag

SEQ ID NO: 27870 - DNA, 675 bp, Arabidopsis thaliana columbia
ttattaagtcatatcccaagccatgaatcagtttgctgtatttttccaagttagaatttttatcaccctcggaagctagacattcagacaaagccgttgctagaagcttgtacaccgcagatttttctgttaattgaaacatttatgagaaaatttcagttatttctctccagcattcaagtttcataatttgcttcctaattagcaaaacgtacctgttgaatctgtagcttccccaaggagatgaagacaaaaatctctggtcaggtcaagatcgaaacttggaacagattcgtttaaatgagatctcagactaaaacggagaagtgattccatgcattctcggagatccaccgacttcgttcccggcgacattggttgctccattttcgtcaaaaacgccaacgttaagcctcttaattaagaaatattcgtgtaaaacaccctcaagtttgtagatattacaagatgttctaacccaatctgaaattggacagtaacaccttgatgtcgttttaaaacggaagatcagagatcagacgttgtcgtttgaagacggaagatcagagcgataagtcaggtatctagcaggtgacacgtgaggagcacgtgaagcttgcgtgtagacagtcacagtcacagatggcatattctcagaatcccattgttgctaat

SEQ ID NO: 27871 - DNA, 566 bp, Arabidopsis thaliana columbia
ttttggcaagttcctttggcaagttcctttggctaataatatcacaattcacaagcctctttttgtttcttgacttagagaagcatgaggcattgaacatggttcactttacatgaggctactaagtctccaaaacaaccctgtggtcataaggagactactcttttggtgagttcttaaataaagttagtttgtctttaaaatagggtaaaacacagactgcaactagacgttacatcagagtatggaccaatgcaacaacagtctataaagcatttttgaatcataaaaaaagaagaagcaaaacattgcagatcattatcactcagattacattgtcatagatcaaatcctgataacctaaatcgagtcagattctttcaaagggaatgataaagctacagaacctgaggcgattcaaactctgttgggatctttctcttgcttgtaatggcaagagcaacatgtcctcactgtgagttgcttatgtcattggccactgttatcattatttgatgatcagtctcaagatttgcatcgtgcaaagatagatcagacatgcacaa

SEQ ID NO: 27872 - DNA, 426 bp, Arabidopsis thaliana columbia
tgtattatcctcttagcgctcttcatctcatcataccatggatcactctcacacaagcgatccataaatgattggagagaagaatttttgagtgagagagaatgaagagaatgaagagaaattgagatcgggagagagagagagagagagagagagagagtgaatttcgagagagagagagagagagagagagagagagagagagagagagagagagagagagagagagtttatctcgagagagataaatgattgcgagagagagaggatatattttgggggaaagttgttgtggggggaatttgattttgggggaaaatgtgttttgttgtgggaagagagtgaaattggagagagagttaatttttggggggaaaggtgtcacacacgtgggcacagatatatagacacgcgcgccgttttttt

SEQ ID NO: 27873 - DNA, 506 bp, Arabidopsis thaliana columbia
tctcaaagatagatttgaccctttcaggagtacagtccacaaaagacacaaactcagcactagctagtgcttcctcatctagcttattagtttcattgatctccaagacttcttcttgtggaattttggaatcaacaagtgatgttagtgccttctgatatagagccctatctatggggactttaagaagacgttccttgttgacatctactttctcggtacaatcactggcgcgaggtgcattcgattcaacctctcttatttctacaggcttcttttctgtgatttcttgagatataacaactgcatcagaggagctggcattctcagacctatcacgttcaatgtcttcctttatttctctccatgtgtcacgttcaaaacattttccatctgcccgagtaaaacgcttcagacaatggattttggtatccgctggcaactctggtgtctccacttgggttccagacagatccactacacgtaggtaaaacattttctcaaat

SEQ ID NO: 27874 - DNA, 541 bp, Arabidopsis thaliana columbia
tcttcttccccacgaggaggacctcctcttcgtcttggtgcaggagagtaagacctgtaacaccattatctaaaaccatatatacttcttgttgacttgatgatgatggaaatgtatgtgtgatgaagcatgttaccttgatcggtatctgcttctagaatctgacggacgacgtggagaacgtgatcgagagattgaacgtgaacgagaccgtcctgagaacaaaaaatcataaacatactcaagctgtgtatacaaaccatgagaacatgtataaacaagtgctttctcaagctgtgtataaacaagtgcgtcccaatctagctgtgctaatatttgtgtaaactttgctggtatagaacataacatgtgcataaccagagagaaaattactaaccatgagaacgatccctggagcctgaaggttccctgaaaaattgagacaacgcaacgattatttccttctcaacttcttttcataaatgatggataacttgcagagcattaatcacgaagagcgatttgattgatactcttttgc

SEQ ID NO: 27875 - DNA, 498 bp, Arabidopsis thaliana columbia
tatttttcaaatcggtttactttaattttgtttggattttattggcgcttttactacctcatgattcttcttcattttaaaaatcaggatttgaaaaattgattcaccttatatataatcttgcttagttttattttgaaatgtgtcaattaatttccaattagtttttgagtttaatgtatcaaaaaaatcacaataatcatttgttaagcagcagtatcttagaaggaaattcaaactcatcaataatcatcgtggtcattaaagttacaagacggatacgaatgtgaaaaatacctcatttaataataatcataaatacaccaatgtgacaagttacttctatttaataaccacctctcgactaacgtgataccagtatttaacccgtcacaggctttttgagttttatccaaatacgtaatcctattgagtatttttaaccttgaaggctgtagtagagtacgtatatcactttatggagtatagtgtaaagag

SEQ ID NO: 27876 - DNA, 613 bp, Arabidopsis thaliana columbia
aaatactctttgttaggagagccaactgagatagagaactaaagataaagatcgaagactaatcacgaagatcccgttagagaagattatccatgtgtcaaaatgttttttagttctatctctatagtctgtactctgtagactctatacataagtgaatgcattttgtaattttattcttaatcttaagagtctgagaccaataccaggaaacaagatttcgccgccaaatactagaggtgacttatggacctttatgggctcacagttagtacggcccattccgatatatatagatttggccccaagtataatgagtttctttttgactctcctccattcatttcattagtaaaattaagtgttttacatgagattacaaagagtaaaaggtacccacaagatacaagggtgttggtccaagtctaattgaattgtaaacgtgagtgtcgttttcgagaaaggagcaaacgtggtccgttttagaatcatgaatcatggatgattcgcaatctagtactatctctcttttagctagatttgcaataatgattatgatttcttgaaaacatggaatttgattttataatgttacatagaatgatgattagat

SEQ ID NO: 27877 - DNA, 442 bp, Arabidopsis thaliana columbia
caacgccgatcgttgttgttgtttctccttcttctttctccatctctcttgtatcgatatcgagagagagagagatagaagaaaggagggataaatagaaagagaagtttaaaagcttttccctacacgaatccttttctctgtctctgtctcctcgaaatctgaatgacggagaaagattgaatttgaaggagacgaaggaagaaaataaatataaaggaatattcgaattttgattttgaaggatttgtttttggaatttaatatgtaaatctaaattgaaaaataaataacaaaactaatttctacctttaaaagttttttgcggccctaattgtttcgtggtttataaatttagccccgagctttatatatatgcatgtcgtataccaaattcgttaacaattaggaagttttattttacagatctatttaaaaattg

SEQ ID NO: 27878 - DNA, 381 bp, Arabidopsis thaliana columbia
gccagtgtgctctaaagtgcttaaacggcaaggggaacgaccgtttaaggactttatcactctggcagattatagtattggaaatggggtgcagctagatctggaggttgggactggagattagattctcttggttcctgaggggaaaactgtggctaggagttaatggctggtttcccggtcgcttacagaatttcgggagtgtgtacctatcgtgatgtgtagtcttgttatacttgccacgaatacgaacgaggtgttgctggaatggggtgtgaactgggatatttcgggctgaacagtggactatgctgataccaattgatttgtcttgagagcgtctcatgtatttacgaggaaaaggctatgatgccattgtac

SEQ ID NO: 27879 - DNA, 502 bp, Arabidopsis thaliana columbia
cgtcttctacttcatggatatgcactatcagatccggcgacgcggtttccttgttacaatctccgtgcgatggaaaaattaaaattaaatatatataatcaaattaaagttttgggtcaaagaaaaaaaatgggtcgacgacatggttatttaattaagtaatgttagttataaatatacggcggacacaaaatataatcggattgtttgaaaagatctaaccatacacgtggctatgtattagtggattgtatacgttttctcgtgacagtattaattcttagatcttcatccaccttctctaattttttatgtaattggattttggtttgaggattattgcatccttgtaagttggtaccacatatggcctgaacccaaaaaatatggttttggggtacctttttttaatcacgaatttaaataaaataaagttagaattatttgcctccaagttgaatttagatacttataaaccaaactgtcgaattttagaaaaaaa

SEQ ID NO: 27880 - DNA, 427 bp, Arabidopsis thaliana columbia
aacaagtacttagattttaaataaaattttcaaagttgacaattaaaaaaaaacaagtacgtatagtcacagccgacacatctgatcaaattttgaaagttgcattaatatacttgaaatgcatagttttgttcttgtaatttacaataatctatggattaagaatcattcaagactaaacgacgcaccattacttattgttaattatataaaataaacaaattctttaacaaaaacccgtgattgactttgcatgaaatcaaacaaagtagaataaatgagatcggattattagtataagatatggaagttaattacaattagaataatgtgtgagacacaaaatcacgaggttatggtccaaaatgtgtaagtatagaagagagcacaatcacaggtgagtagttcaggttcggtgtcatctagt

SEQ ID NO: 27881 - DNA, 185 bp, Arabidopsis thaliana columbia
cttacgattattattagagacaacagtataaatctgtttatgcaagtccatgctatgagttaagtttacatttttggtgtacgtgtagggcagttttctgatcattgattatattttcgaagattcatgcaaagctcgtataatatcatgcatttttgttgaagtcgttttccttattcgtatcc

SEQ ID NO: 27882 - DNA, 772 bp, Arabidopsis thaliana columbia
ctctgtatgtacttcctctaaagtattactcttagatcgaaaatacaagaggaaccaaaatcaaaagcaaaaagaaacgtataattaagaatggtggtaagtaatgtgggtagacttatcatctttcgttcctttatataatgtttcaccatgctcatttaataataatctaaccatattttcatcaacaaggcccatcatgccttgtaccatattttcttcaacgacacatgatgttatgttttctattttgtgagctgattgtatctgggtcaaaatggtctctgggcctagtaatgggctctacacaattggatttacacctcatttaacagaagaacagaagttaagcatgtacaagcctgaaagcccatacttcagtttgatactgaaaagagaaatttaggccaagattttaggagattttagatttcagattttggtttttgtaaataacatgagatttttggatcttgttaagaaattagtaaaaactcttagaattagattccctaatttatatagggaatcaactttcctcaaaatcttgaatggtttaaaaaatggatttttggaaaaagctaaaagcaaaaaccatagccttggcttaggccttttttttttggttatacataagacaaatagagaaaatatttaccaaagcaaataataaaaatcctaaattactttgaccaaaagaaagagataaaatattaccaaagcaaaagtaataaaaatactaaattactttgaccaacagagaaagagaaaa

SEQ ID NO: 27883 - DNA, 743 bp, Arabidopsis thaliana columbia
ggttcgagtttgtcgacggtcgtgatccgttgccaccacacagatccgccgcgagttgatggctgagatgaggcaaggcagggcatgaggaaacaacaacctcgcttcgcgaacaacgcctcgtgcatatcgtcggtggcatcaacttcagcgatcggcggcgattgatgactcattctcagagagaaacagaaacgaaggaaatatggaatttcgtcctgatctagctactctcttttgtctccttagatcgtcgttcctcttctcatctccaactctaaaccctaattttctccctctacccaagagatttctatcaccttctccaatcaacgcgtctcttgagctgtaactaaaacagaagagcacaaaacggcgtaaccgccaacccggcaatattggttctcattaaccctttttaaccgctttggttttatcacatctaaccgggaatttcagctgttgatgctattaatttattaaaccacatatgaatgaaggggttcatatacgtaattgacgttagcacatttggttccaagtattgatcgatacattaaaccgcaataaaattggtccgtttctctctggcccaaaattggttcgatttctccataagctgaaattgataactcccagtggatgtaatgtatctaatattcttggaacagattcattgcaagtgaatgttctaacagaatccctaatctttttgcaaaatctaatatagtaagtaggataat

SEQ ID NO: 27884 - DNA, 479 bp, Arabidopsis thaliana columbia
attggttgtattaagttaaatatattacttaagagtcgaggaaattgcatacataactgaggtttaaattgagaagcagtagaagaggaatgggtgtagaattttcaaactcgacgacaaatcgtcttggcattttcgatacacaagttgtgacaaagagagaagagatactcttagtcttaatccaacagtagatgtgattataacgcacccccgcatgtcggtttcataattgggtcacaggtcaatttcgggatgttgaattttgaggctcctttcaaaaactcaagctgcatgcccaacgcgctttttcattcttttggggaaaaatattaatttcctaattcagtgatttcattaagatggagaaagaatcatagaatgaactttcgaatttgaaggaagcgattagccgacatccacatggtttgagagatgagatgatagggatggtctcgtattggacgtaatgtcagagc

SEQ ID NO: 27885 - DNA, 513 bp, Arabidopsis thaliana columbia
gtagccgatgtcaatggatactatatttttacaaacgtatactagctagtgccatcatatatccaacgaatttgatgatattcaactatgcaaagttccttgtattttggaacaagttcgtattatcaacaaacctacagtgtatgattaaattagagcactttgttttcatttttaaatagaatgcactagattgcatattgaaactcattagtgttgtaaaactcgatgtgttttaggctccttcctttattggttcaggcaaaccgccaaaaaacggcactggttttgggtgacatggccttgaaacggcacaaagttcccttctcctatcaatagacgctcacataaaccattttcgtatttatctggaaacaatattagaccgtcagatcaaagattaatgggtcacacctcatctcaacgttccagactgttgcaactacgtgcatcagaccacagcggaattctcaccttctcctctgtttgtctataaaatgagaacaaccgttt

SEQ ID NO: 27886 - DNA, 539 bp, Arabidopsis thaliana columbia
tctagaggatcgacgatcagcagcggaacagagctcgctgattagctccgatccctgatagtttccgcgtcgtttcgccacggtttcaatcagaatctcgttcactagatcgaacaatagcctacgattgcatcctagagccaatgttcctgatggataatctccaaaatgctctagtttgcggaaaatcgaaagatcgagcattgcttgtgagtcactcttgattcccgcaagattcattattcttatgatatagtcttgttcagaattgatttcagtggctgcatcgtcgaatttgtgattcctcgctacttgtggactattcttctcggttttgtgcatcgaactagagcgtatcgatgctgcttcattcgatattagtcgctctctttcgttaatcttgaaaaaaccacgaaaagggatttatcaaaggttgaaaatttagtgtgtgtgagagttagagagaaacttgaaatagattgtacgtgttgatgaggaggtcttgtggcagagatgttttcaagatcatttgactttgg

SEQ ID NO: 27887 - DNA, 542 bp, Arabidopsis thaliana columbia
ctaaaggtcccatactctataccccgtccatcacgtcttccaacggctcaggatcctcagaggagcaagggacgatcctctacaactctgtcgggctacccactgcacataccggcggtggagcactggtccaagtatggcaatctcgacagaccgacccagaagcatccgacatattctcactcggcgccgtagttttggatatttttacttacctttgcaaacggaaaatatccgcttttgccagccatcgaggtgcaaaaaaccgaacggctggtcgaggtggcggtgttgcagattgttctttccatctggaccggaacattggccaagtgagctcatggataactcttctcgacagcgacgcgaagaagcgcaaagaccccgtcttccaggccatccggccgatgctcgcaatgtcgcgagacatggtaagccgagatccgggcgatcggcctctgccttccaggtggagcaactattcgcttgttcgatcaaaaaagcagagggtagagttgcgctctgctgttcgtctaacctgc

SEQ ID NO: 27888 - DNA, 455 bp, Arabidopsis thaliana columbia
ataatcttcacctgactttttgatgtatgccttccctgatatcatcgtgtaatcagatttctctagaatctgcaaaatgatgaagcaatattgttagttcacgatagcacttgatgtaccaatgacaaatatgatattggttgagtgaatccaagagtagtgatctagcttgggttctttggttttgtattgagaaaaatttagaaattattatgaaggaacaagtcatgatcgaaataatcaagcaaaacaatgcttgacatttcatcgaacacctttcagtgcacaaaactcatttccgaaataaacaaaaatggatagaggaaaatcgaaatgataccgccattgctgtattctggtactccttgaacagagtagcagaaggaaagctaccggacaagctatgtcgcatctcattaatcggatcgttcttaacacagctcgctgacggagaa

SEQ ID NO: 27889 - DNA, 500 bp, Arabidopsis thaliana columbia
cccgtactttcaattcctaatcttttgaaaatcttgttattctttctgcaagtttgtaatctgtgttgtacacctcgaactcaactcgtatatgaccttgaggttcctctgtctccatatcacccctctatggagtgcctattgttgtagtcgtccttctttatgaagagaacaatatgttttctaccctccttagtccttatccacctttgtctcctgttttccaatcgagaaccccccctcattactcctaacctgtctcatcatctttcgcgtaagaagtaatgtatctcacatgccagtgaaaattgaggtttcgactcatcatcttctcgtttgtggcaatgtatctaaacgctagtgtttttatcatgaggaatttgatattatttgtgttttaaatgtctttctgtggctcattacgcatgaatatgtattatcatcgaaaatatcaatgacgaaagaacttggatcttcttcccattttaattgtgcacata

SEQ ID NO: 27890 - DNA, 534 bp, Arabidopsis thaliana columbia
cgaataaaaaatgtgcttgatgatgtattacatatgcatagacatgctgagcttgtggaaatcctgaaattattgatggatcctacctgggtggctactggtttgaaaattgactttgacacttttgtaagtttatgcatttaaacatgactctgagtgtatgtctccctgctttgttttcttatctattttccttgatgataagttcctatcccttcacgagttcagaaaataagcgttgaatttgaatgccattttttataatccaactagcttatgagtatgagtataaatcgtagttttcggtttcttgccaggtcaacgaatgtcattgggcgtctgatacaattggtgaaatgatctctttagatgagaatgaaagtcatcagaatgtaagtaaatgtgacaatgtcccgaacgaattcttttatgatatggagtcttcatggcgaggtcgcgttaagggaattcatatagaggaagaaatcactcaagtagaaaaatcagctgaggctttatctttagcagtaagta

SEQ ID NO: 27891 - DNA, 505 bp, Arabidopsis thaliana columbia
tatacacacatatgtagttgttgcatattaagtagaaagagaaattcaatgttgtgaattttcaaaaaagttgtaataatatatgatactcgatccttattaacatgtaatattaggccttggctgaaccggattgttcggatcggtttgtttggtttgggagaaattcggttttcaaaaaatctcagatccgtattaaccttttccggaatagatccatattaacctttacccgactcaaaaattatatataccttttttttaaagacggatactaaatggataacggatcaaatacttgtaactggtatatcagtgcccagcagtctagcactagtttagttgtagccatatatttgacagctgaataggtttggtcaaattttggccacggcattccgtaaagggaggcataaacagggtggagtttttgttacagaaaacgtcttgtttctttaatctcagtacaagacaacacgcagtttctattcctatcagatttttg

SEQ ID NO: 27892 - DNA, 552 bp, Arabidopsis thaliana columbia
tatagtttttatatataaaagatatatcatatttaacaaagtaatatatttaacaataataataaagtgattaattttttaagtccaactaaagtataaagccgtaacaaatatgaaaatagtggagatcaccgatgacataaataaactaataaaacatcgcggatttaaaacaacgaatctcgattttctctctcatcatttcattcactcttaaggcgggattgtgaagtcttcatcaatttaaaacatcaaatgagtatatgaactagaaaaagttataaaaataatataatatagtctaaaatcttttattttagactttttttccgagatatcctatgtatttttttttttcttcattaaagtttctaattttctatcctcttggtttttgttctgttttcattttcttcccgttgtctccatgaatttttttttactttttcctcataaattaattttaagctgtgttctaaaaagcggtttaggcggcactacgctcttaagtgactcgtagacaaccgctttgaccgcctaaatttgcataag

SEQ ID NO: 27893 - DNA, 418 bp, Arabidopsis thaliana columbia
gggaaaatcttatcatcgtaacttttcgttaaaatattaacaattactattttcgttcgtgtctttttatcgttgctttatgttaacatattgaaggttatgtgttctagttgtgtttttatcacaattttctattaaaaatattgatggttactttttatcgtaacttctattaacattggcggttaatttttctcggttgtgattttttatcgcaaattgttataaaaatattcacggtaattgttttccgttaatatatactccctctgttcttggaagtctgattgtttaggaaaaacacatatattaagaatacactattaaacgttgattataaatgtattatcgctagtgtttacagtgttctataactctaaaccaagaataattaactatttttctcgaaaattacaat

SEQ ID NO: 27894 - DNA, 658 bp, Arabidopsis thaliana columbia
tgtctttaaaatatagtagcaaggtgaaagcactattcatcttacgtcgaaaacatgtttctcgtgttaaatcttgtattatataatatgtattatataataacatatttaactattttggtaatttaattattattgttaatttatacattaacaatttagttatcaccctaacatgtcttttaaagtggtaaattgtatgctacttatagataactattgtacataacgaattattcttttttatatcatgttaacattcagtaactaataaattaacaattatctattcttataacatattaatttatggattagcttatttatttatcatgctaatttgctttatcaccggtaatttatgagttattatatacgttaaacttcttcttctttttttcttctctttcattttcaactctttttctcttacaagggtaaaaatgtaaaaacatcactctctatcttacctatctaattaagaaaaaaacatgcatatatacttaattatatcactcttcaatgcatatccattataatttctctaaactatactagaacgaaatatgataaatgtacgtaggttagattaattatggtgatatacacgtaagcgctcacactgatcccaaagcttctatagatactcgatcatgtt

SEQ ID NO: 27895 - DNA, 481 bp, Arabidopsis thaliana columbia
gaaaataacactaagcttcaaacacacacgtacatgaatgtttgtttttttctttcaaaaaagctgaacaatgacattttaagtccaaatgaaaacgatggtatcatcttggacttccaattttccattgcccatatttactctttactattgtattaatccaattggtatcgaatcattcatataaaaatataaataatgaagtcaaatttttcaatagtaacacttgagtaatagtggtcctaccaactttttaccaagacagatatatttaaataaatacacttttaaccttttactgtgtttgcctcaaatgagtgtttttaccagtttctgtgtatataaatctgcactccactctcagtttatcttcatccacaagacagttctttaacaaagtcattaaacatttcccttaccttctaaagatcaactctttcaaacacttactctgcatgtagcttcatagattgaacgaaga

SEQ ID NO: 27896 - DNA, 537 bp, Arabidopsis thaliana columbia
atttacctcgttatatctcatgcaattttggttttcaagaaatatcaaactttgataagttcttgtatctaatatttttacgctttatatgttttatgcatctaggtattcgccttgtacattgggtatttacagtaatatctcagatattgtaatcatctaattaattatgaaatgagttttcgttttgtccaaaagaaacatagagtatataattggtatcatgacaatttttgtaatgaattggaaattataaattacttggtacgacaagaaagaaaacgaatgcggtaaagttaaagaaaaaagtacacttcattaggtggcaaaacaaatatcattttctgcttatttcaaaagttgaaaaattgaaatataagactaaattacataagatttattaaaataaagtagaggaacgtagaaaaatgaattcaactaacaaggattagctgattcatcgtttagaagaagaagaagaaaaactcaaggaataaacagtcatacatttcagttcatgtacatatgaataacaat

SEQ ID NO: 27897 - DNA, 548 bp, Arabidopsis thaliana columbia
cttctgtgattgaaacacagagagaatgattttaccaaagcagtattgttgcacacactcgccgagctgccaatgcaccaaaggccatttaaacgaagacgtgttgttattagtgttccaacatttgaattggaatccgaaattagttgcaacactttcctgtgtatgcagatggtttgatgatttcgccaaacgggtactatggaaagagttttgcaagactcgtgccccaaaaatgatgcttgatttgcagtctagcggtagtcactgcattgacggtaactggcgagcccttgggaagcttctcatctactgctcaggatgtacacaaggtggtcttttcaatagctctgttcaaatcccaggccactttgtttatagaacccggttctcaagaacattaggaagaagcctccttccgcctcagtgtagaactgatgtactctatgtttgtgatccatgcgagcatcttgaccaaggagaagaaggcgacgtgggtttgtccgtgggatttcaagtcattccaacatcgagagttcggaaagtga

SEQ ID NO: 27898 - DNA, 478 bp, Arabidopsis thaliana columbia
ctgggggttcaacaaaatagtgcggtttaattaaaaggttagatattcatactagagcttctatgtaaatttttatatcagtatttgatgtatattaaaaaaaaatacgactgttttgtgtgaatacacctgttagtctgttacacagtttgaagaagaaaaaaaaaagaggaaaagatagagttttcatttatttatatacatattgaaacaaatataatgctaaaaatggaaggaatttttgtgttttttctatcaacattcaatattttttgagaaatttttgagaaaatcctcgtgcgtctgaagtctatttccaatgacctggttttaggcagggtatttttcttcttcttaaaaaggtttaaattaacctcaccttatatactgatttttaaaaatatatagtcattaactaaattgcttaccaagaattctatggcggcgctgactaaatagatatggaaagtagtgaaga

SEQ ID NO: 27899 - DNA, 508 bp, Arabidopsis thaliana columbia
tgcaagaaaataacaatttatcgtacggagaaactcttaataggaaaaaatatacacaaaaaggcgaaaaaaaatgaaagaaagaaactcagacttctcaggtgagaaaccaaacacaaaagtacaagagagaaaaagtgaacagtgtcagaaacattacacagatttgtattacgagcgaaaaaaaaactgagttcgaaaaaaaagaatgtgtggcgttaatagagacgttggattttgttagagtgaatattttgggaaatctaacggtggagactgcggaaccaagtggctaagtatgaaccagcatttttgtggcgactgttcgttttgatcgaggcaaaaactagccttgcggcaagatctttttagacgttaaaacaaggagataaatcacttgagtataaactagtcttttagcgaatggaataacacaaggttaaaggctttagagcccatacgggccaaaacattatacgactttgtgtaatagatcatataggtaaac

SEQ ID NO: 27900 - DNA, 1832 bp, Arabidopsis thaliana columbia
agaagtctcaaaagtgtggagcataggaagaaggtgattattgataaagaaaaagagttttccgattatcaataaataagaaaagttatatatgaccaaaaggaggccttaaagacgcctctttctgtgttatgtcaaacaaacaacaaaaaaactaaagagaaaaattagagtaaaagacctgtgtggggttgttggttatttggtcggtctgttgtaaattcacattgtcgttcacattacggatttctatgaatttctacttatgtatcttcaaaaacttggtctagcaaaaccaatttaatgtatcgattccagtgtactatagttatgatggtgtcgtgtgacttctgtcgaacaaacaaaattatggtgcttaataatggttttcgatttagttttcacttcttaaaatgtgaatttcatcatctcatcgagctaagttttgtaggttctgtatttttagaagatatttttgaccttgtgtttgcccttttagtgaaaatttcaaagtattactctttctcaaaaaatctacaaaaatcttcatccatttgcattctgcgttcattttgaccatactagtgttcatcattagtcgaacggttaaatggcaggcattctgagttcaagcaaaactagaatccgctcttaaaccccagaaacatcataaattcatctgccaatccagaaaaaaaaaaccttcgttgtacagacatggagattccaatagagacttcttggaaaaaatttgcctggaaaccgatgcgattggcttcttatctctttctcttggcaccagagcctcttcctgtagctttcttctcagcagacgtatcagctgctttccctctgcctctgcctttaccagccgcctttcttgaacctgagcttccagctcctttcaaatccaattccacttggatccctgcaacccgattatattccgttaagacttgcagatccccgcccagagagggataaggagtcaagtttttggaaagtcgtcatcattcagagccagtatatatgaatttaggttctagactgaatggctttcttaaggtaaagacaactatctaaagcagtaacaagacgaacctctagcattcagatttttaagattggactccagcttttctccatcggttgcttcttctggaagatcgaaacaaaacagagaagaaaccaagtcaggatttcgtctggtctacttccaagtcatattagatatcgaaggtaattttgtaatgtctttctgaggctcagtctttgattatacagatccagttacctgaatctacacaaataagttcacaaagatgtatagtacctgagtcttcttcagcgtctgatccatttccttcttcattatctgctaacggctcaccatcttcatctctcaaactatcaacagttggttccagcatagcagctattcgcttctttggcgcctttttcactcccggaagctgcaccatgtccgccacacgtaccattctggttttattcatctcattatattttttggtcaaagctgctttaactggaggtggaacaccctccatcggattttcacgtccctgatttgtaaagtttgcagtacattagagaagattcattgtcgtagctgtggcagtgatatcccatgaaaaaggaaatcgtgtataccttaaatttcccaactccaaaatagtatcaaagtcctcctggcttatagagtaggagttcatgaaatcaacaacttctgaaactgcttcatcctgagtaaatattatcacatatatatatatgatccacagtacagatacatatataatatcttataatat

SEQ ID NO: 27901 - DNA, 524 bp, Arabidopsis thaliana columbia
gtaatatttattggttagtattggtgaattgtaattttcaagaaaaatagttaattatcattggtttagagttatagaaaactgtaatacacaaaaagtaatatatttataaccaatatttaatatgttttttaatatgtgtgtttaaaaaaaaaatcaagtttaaagaacaaaggaaatatgagataattaattaaattttttgtttttttatttgaaaataaaatattaaatttatagtatacatataaataaatcaccatgacaaaatggtagatgcgtgtaattaagtgagtcacgtaaattaagagggctagcactcccggccccgggcactctccgacccacgttttggccccacgttaatcatcaaaacacattttgttttggtatcaattaatcatttaagttccccacaatagaaatcattttggtgcattctctatgcaaatttatggatcgaaatcgaagttaaaattaagaccgtttaatggggaaaagaaaagaagttttaagactagcta

SEQ ID NO: 27902 - DNA, 520 bp, Arabidopsis thaliana columbia
  unsure (1)..(520): unsure at all n locations
aaaaatagttaattatcattggtttagagttatagaaaactataaaataataaaataatatatttatattgttttcttaatatgtgtgttttgctaaaaatcaatctttaacttaatagagcaggtagaactgaaacagttttatactaataagtgtagacctacgacaatcacaaattacagcgaccgtctcggaggacctccaccattctgacaaccaccgccgcgaccacctttaccgcgttgactacatgatgctgatactggtattagcttccttctctctgctattttatttataataaaaaagaaaactcacaatttattaaatgctaactaaaattaatctactgatttaatgaaaatactctaaatagtgtagggtcctttttattgttgatcaaactgaaccaaaatcgaaattgtatcaaacaaatgaactgatttgctttcatttttttccgattgatacaaaacaataactanaaaatatagttaaggaaatcaataaaatgaaatt

SEQ ID NO: 27903 - DNA, 549 bp, Arabidopsis thaliana columbia
tatattggcatgatggatttcaatttgaattataaggatggtgagaatatataaaaagatgagtgattaaaaccatataaaatgtgaggtatgcaaaaaaaaatataaggacacgaaactggtaaaaaagcttttgaggtatctttatgcacaaaaggttgtcatgacatgaatgtagtacttgacacatataacgtcgagtttggagaagtaattgacatctttcaagctcatgagataaattttgaactcctaaaggttagagaatcctaagacagtagatctagtagtatatatggtaaaaaagaatcagagagaagcggaagccattgaaaacctatacaaaggttaacaagaaaaatgatctatgttgttttgtttctagtcaaacatgatataaatgtaacatgttcattcttctctatgtagtagtattcgttggatattcataggatgataaagatgtgtgtgtgtggtctgatggttaagttccaaaaaatcttctcttggaagttattatatcgtagtttatctttctaaaatttaagt

SEQ ID NO: 27904 - DNA, 304 bp, Arabidopsis thaliana columbia
ccttccaagaaaaatagttaattatcattggtttagagtcatagaacactataactaccacctagtattcaatgtccatggtcctcccaaagagagtgattgcctataatactaacacagactatccacgtgcaagttcagctgacacagaacatgtcttagcatgagcatttgatatacatacactacaatatgacaccgacactagaagtttatctgtacgtatctgaagtgtatatgagtaccagcccgcagctgacacacgtattcctgacccacccaaacattgatctcagggcagtta

SEQ ID NO: 27905 - DNA, 584 bp, Arabidopsis thaliana columbia
gagggtaaataggtataagtcagcagtcattaacatcaacattgaaactaaaacatataatagtccatatgtcgacagaaaaagtgatgaaacacataaatcatcacaacgcatatatgcataaacaaacaaatttaagccagcatcgtttttttttttagaagtctcccaaaatagtcattaactacaaaacattcgataaagtcgtcaattaaattccatggaagttcggtaattttgtaaaccaaattaatttctattttgaaaactaatttgaagacaaaacagaaaactgtgaaaaaactatactatattattcaccgttggtagttattatataaaatcaagatgtataacattttattttattcaccgtaggtagttatttttttgtcaaaccgttggtagttcaattgatgtatataattagttggtcatgtaaattaaaagaagaaaatgtcacggagaccttagcatatagaaatcatttattcgcaattattatttacaatatgaagcacatgttattagtcaagccgatcttttgacctttcgagtcttggagtccaaatagaagattcact

SEQ ID NO: 27906 - DNA, 776 bp, Arabidopsis thaliana columbia
agttatgatatatacggcatggtatatttatcttgtgacattgcaagttgcttttcacacatttttttcaatattgatccacattcaaatgggcttatttctgatttcctaatgtcaattttcttctgtttagccctgcactctgttcttgtttttgtacccgttaaggggctttgaaacaacatgctactttttattatgtgtagaaatttaggaaaaacacaacatgagatacggatatattgatggccaaagaaagtgaagagaatgctttattagtataacaaactatataaacatatcacatatgtgatatgtataacaagttactataatatgattcaaattctgtttagaatattttctttcatagataaagagattgtaccatttacaattatttcacctattaactcctaaagtttattcatttgcatgtacggtgatatacctaaagtaaaagcaaccacaagtaactataactaactaacgtttaagccagattgtttttatagaaactccttcaaatccaggactggtcacgtcattaatatgtaattgtaaaaatggtttggcaaattgtgtgccaaacaaacaatggaagatgcagagattgggaaatagacttgtacgtgatttgcaattttctgtgtaataattgtcagcaggcccgtgacctttatctgcattcccctttggctttcttcttctcagtttctcaacaatatatattcactatgacacacatgcatattcatttgatccatctttacatg

SEQ ID NO: 27907 - DNA, 530 bp, Arabidopsis thaliana columbia
tggaacttagtaatcttttgattgcttctactgccaagcctcaagattcttttttttttaatcattcaagattttttttcatgaggcatacttatgttgcttaatgtgattactatatccttcgaagtgttgatatacaatatgtctaggttaaggctctttggaatgctagctcggtgaccgttctgccattgattagatttccaaatattattgcaaggaaggaataagttcagtctcgtggttctttatgtgttagaataaagatttctagatttttcattcactcatggtcaacaattgtctgatgcttctatttgttgttttatagctaggcttctttttctggttatggattcagagattgaacatctttatgtttctgtttggttgtttaacgctctcttttaaatttgattcctacgtttttagttctgttgtgtaacttgtaccattcactcatggtactagtaaaggcttagagctgtctttttggttcactttcgtttttgatttattactttgacttc

SEQ ID NO: 27908 - DNA, 1106 bp, Arabidopsis thaliana columbia
ctcattccttgcatctacaattataaacaccaagagatatgaaattttagctattaagtttctaaattcaatattcagaaagaggaacaatcgtttaataatgaaccaaggcgttgaagtcaaagtaataaatcaaaaataaaagtgaaaccaaaaagacagctctaagcctttactagtaccatgagtgaatgaaacaagttacacaacagaactaaaaacctaggaatcaaacttacaagagagcgttaaacaaccaaacaaaaacataaagattttcaatttctcaatccataagcacaaaaagaagcctagacataaaacaacaaaaaagaagcatcagacaatcgattgaccatgagtgaatgaaatatctagaaaccttgattctaacacataaagagccacaagactgaactttatataggccttgcaataattctagaaatctaaacaatggcagaacggtcaccggactacaagaaaacaagccatttgcgactccaataaacgtccccagacggtcgcaaacaccttagtaaagactactttgggactactttaattggtcgttaaaaaacggtcgcaaaatctttcggttttaatatagtcgccaatttgtgacaatttcctgacaatacataacagtcataaatacgcgactaatatgtgcctcagttataagttactcttttccgacgtaaatgcaactagttttgtacgtctatgaaaaaagaaccatggtcccaaagtattcgcaaatgagtattggttttgttgcgactaactgtagactctttttgcggtcacattttagtctcgtatttctaaatgtttaacctcgaatttggtcacactgttctaattggtttggtcataatttagtgacaggttttggctaatcataaacctaattaattaccaaatttgaaattttagtaatcaaactccaattacaaagattaaaacccaatataacttagcattatcatcttaaacagacaaaagattatcatcctacaataagtttacaacataacaatatatgaaaatagttcatgagtttcagaaagcattagacaaagggatgagtttaattcgctgcc

SEQ ID NO: 27909 - DNA, 319 bp, Arabidopsis thaliana columbia
catttaattaaatgttttctaaaattgttgtttgttgttttatcatgtcatcgctaaaaaggaaactcaaatatattaaatgcgctataatataacaaattgtattcaaaggcaaacgaagggtcacgcggcgttttgggaattgcttatgaactaattacattttattacgttaaaaaaaaacgtacggtgcatttaaatgatagggctaatctcagccgtctgatcaagacgatagtatataataagcatatgactttactctatatccctaaattgccctttttactgatgaccccgttgtcgttagcacttgacg

SEQ ID NO: 27910 - DNA, 337 bp, Arabidopsis thaliana columbia
cggttcttgggggcgggcacctcctccatgaggagccctcgggggcggggcgcgtcgcgaagggacaggagcgcttcctcgaatcgtacaggggatgccacctgcctcgttctgacgcggcctaccgttgacagtcacggatgccacgctagtgcgctaccgcagcgggcacatgaagccacgccgctgggagggttgcattgtgtcaacgaggtgcctgcctttctgaacggatgtgcatcggttgcctccggcgtactggcatccggtcggtcgggatgtcgcctggtgcgctcagtcagcgtcgggcgatgagcgtctgtccgggcggcaggca

SEQ ID NO: 27911 - DNA, 429 bp, Arabidopsis thaliana columbia
tatataaaagcatatcttgacaaaccaatcaattatttgtgacagaaagaagaaaaataaatgaaaatgattgaagatttgtaaaaggaaaacaacaaaggtgattagaagcataagattcctaaaacaaatcgtggagattacatattgtccaccactcgaacacaactcaagagactaaatatatatgttagtatgtttcggcattgagccaagttatactcttatcatttgcttcattttattagtaaatggtgagtttcatttctgtcttttaattcaatccaattctctcaattgtttcagttgagtacaaaatagtaattgcttctacaaaaaattactaatagatctaatgtatcaaatttgtaactttgtaattaattattgactacactaaatgtatattaaaagctttgtatgactact

SEQ ID NO: 27912 - DNA, 586 bp, Arabidopsis thaliana columbia
ggttatttttaaagctatttatctcaagggaaattaatccttttctagagaaatcttaatgatttatagcatagagattagagaaaaatcttaaagatcgaaaaaagaatatgatgatatgcttgagctaaactctatgtaacgacttcgttcagtttgatacataatcgtacatgcataaccttggtccttcaggcctagtcgaaacaaacaaccatcttcaaccggtccggttccctctatgattcatttaaatgctccaaaatccgaatacttattaggatgaatcaaaagtcttctaaagcataaaaccaaagtctcttttggcctcttgagtcttccaccagcttacgaaccaaaaccatttgtcgcaatattttttcacattaaaatacaactatttggctgtaaacgagagttatcaatataaggcaatggctcgtaattaagacactcgatctcatctcaccgcgtaaaagatagttttgtcggatccgaatcacatgtgcaaacaaacaaaacttgaggctgtgattaaaagacaacgtttcgagtttattgctttgattatactgatacaacaaat

SEQ ID NO: 27913 - DNA, 507 bp, Arabidopsis thaliana columbia
ggaattgatttcacattgtgtttgcgtttggtcctaatctaaagaatatgattccaaactgatgatataattgtaaagccgttgtagcaaacatcacttgatcaatcattcacttccatctgcatacatgtagtaacatcacccgatgaaggtggagtgcatgctgaaacggtgtagagttcgatcctaaagcttttgtgagttcatgaagatgtctacgtatttgtagacccaacgacataggtacatatacatacacatgtagtcatatctatgattctgcttacatatattatgtaactcttttctgtcttatgctctaagagaacatctctaccattaaagtacatgtcaatacagaccttaaaatgttaaccatttgtatgcttcctgtttcagatttatttaataaacatgcttcatctggaaagaggaacccatggtgttatgcttaattatggatacagtttctcattttgctacatggaagttgcatttactgacttt

SEQ ID NO: 27914 - DNA, 413 bp, Arabidopsis thaliana columbia
gccagtgtgctcaaaaggtttagtttctagattgagctttcataatattaggcctttaagttgaatttgttggttacagtttaatgtgtgcagggcctgtaagtggaaggttacactgttgtatttcttacgacttaagatataaataaagagcaacacttatgaggaaaaaaaaaaatctacaatacggtttttttttttttttatttcttcattaatttcccaaatgggtttcggcccacgaacatacaaagattcatggatacaaaacggaaaagtgaatcggaaacaccggtgatggccgagatctgaaatgagtgaccgaccggaaagcaaaatctcccacctactagatccggtgagtacaaggtccactgcgttgcagctacatcgccggaaacaacctttgacag

SEQ ID NO: 27915 - DNA, 1151 bp, Arabidopsis thaliana columbia
cccgtaataagaataagaataagaaaaagaacaagatccgtttcaaaatcatcttcttcggaagatctattacgctcgttacccagaaattccacccttttggcacattcaagtatgacatcggcttctgctgcagttcgaaggccagctttccgtagaatgcgaagcagccttctgatgaaaatctttctccaggaaatcgttttctttcaccaaaaaagacagacactagtaatgtatcagaaggatcaaacaagtccttcgatttagatagctcagaggaaaattcatcagaatttctgacaaatttcgcctctctaagagcttcaatcacatcagaatcaacctctaaatccagccagtttccatatacataaattagtatgtcttctcgttcagattgagatctactttcaaactcagctaacccaaaccttactaaagtctgatgattatgtaacacagtgaccccaagggcttggagaaagtgacattcaactgaatctggtaaatagcaaaagcaacattcatcatatggtttaaggaaggaatctccagagattatacacaaaccgtgcctttgcaaatgcgtataagacccagtgacagtcttaaatataggaagtgaacttagtacttctagttcatatgcttgataacttgaaccactagaagagaaatcattagccaaaagggtgaacagatcatcacggccaaatgttgggaaggaagcaatatcagcaatgtagccagctcgtttgccttcagcaagcttggaggcaatagcttggccaagtgacacgcttggtgaaggcagacacttgcatctctcagcacaatcaatatatgcagtatcacaaactggtatattgcactggttcagcagtaaaatcagccaaggatgcttgctttgtgctagatcgaatcctgaaacatagcgctgtgttaactcagataagggaccgccacttactgatgttgtagatatatcactgtctgtctgatgcatatcagtaccacttctagaaactggctgcaaagctggtggtggaaaaaagattaagtgtctctcccttacacggcataaaattggtctgccaaggaaggcaggaataagaggccagtccgaaaagagggagagctcatctgct

SEQ ID NO: 27916 - DNA, 527 bp, Arabidopsis thaliana columbia
tgaagatttctctaggacgtgaaggaggaacttctagtatgtatagcctttagccatcttattttgagcatgaaattatgtttcctcgtaacttcttttttgatggcataaaatcaaggcatttaaaaaaaaacaatagatgaaaatttgtagttgttggaatacataagataatccatattagtctcaccaaatttgttaagcttgtttacatctatgaattaaatttatttaatatttacattttaagagaattatcaagcaataggtaggtaaaaagttgtcgagcaagatacaaacatatatataagcccattcaaatttatttttccatataaaaaaatttcaagtgcttatatttttgtttgaagtgtttttgataaaaattctattgttgattggcaatttcatgagatgactactcttaatatcaatataggataaatgtgactttttggggcgattttattttacattgcagatgaaaaagtcagtgttttgagatttaaatacttttccaatgacga

SEQ ID NO: 27917 - DNA, 609 bp, Arabidopsis thaliana columbia
  unsure (1)..(609): unsure at all n locations
gcacgtgtgacttgttttgcataaaggacttgcatctcctaaaccataatgtcccttcccaatagctagtgaaccatgttaactgtgtagcattatatatactagaggaaagatcttcaaacttccaatgtgggacaaatgttattatttgttattacgagctttcaagctcaccactttggacctcaattactcatttatagtaacttcaattttttacttttaactacactatactatagtgctcattacaaggaatctaaagactctatagtccggtcattccagtgacggaccttaccggaaaagacgtcaaaaagttggccggagccacttgtaaaaaatgagttccaacattgttgtgatactcgtaaatggtggcaaagaccaatttattttgaaccctaaaaccaagagcttaagaagatagaggaaaagttgagttcttccagagatgttttcgaggcgaatggatttgcgagataagcgatgaagtcttaggttgcaaatagttgtaatttttcgagttcaacacaaatttgcatcacttattactctaattgtttaagtaacaaatcaaggnaaaatttgagaaacaagtttagcatg

SEQ ID NO: 27918 - DNA, 574 bp, Arabidopsis thaliana columbia
  unsure (1)..(574): unsure at all n locations
taataactttattttttatatgtaactacactatcttatagtgttcattacaaggaatccaaaaactccataatccggtcatttcggtgacggacatcaacggaaaagtcaccggaaaattggccggagtcacatatgtaaaattgagttccaacagttaactctccagagatcgaaccatcgtacgtggtctatatttataaacgtcaataattgttttttatataataaaagtgtcatggtaggttaaataatttacgccatattagtaattaattagtggctagtcaaattctgttccataaaatataatagtatgaacacacattattgtactgtattcatcaattgggactagttctttctgatgatcatatataaaggacagcagaaatcggacaaaatcagtgttattgtcttcatttatcatacgcacaaactaaaaaataaagtttggccgaaacgtgggtgtcctaacccaaacatatatgaaaagcagagaatatactatatctactttaatcgttacattaatgttagtttactanaataggtttcttttgnagaaaaaaag

SEQ ID NO: 27919 - DNA, 569 bp, Arabidopsis thaliana columbia
cccttccttttataggagagaggtgagatatgcgatccgcaaatcgagggagaggtgagatatgcgatccgcaaatcaaggcggagatcgcgggattcggagttatgcgcaagtccaagacgttggcgtgattagcggagtcattatcacaaccgtttaaggattcaaattaattcgaataaggaatattcggatatgatattccgaatataccttaattatgcaaacgatatgagctttcgtttttgggccaaaaactatgttgtacaaataatgcaacaaaacctcataagtttttgctccaaaagaacattgtttgtgggccccaagagcccaagcccaagcgcggcccggcttggcccggcagcgtgcgcgtgttgttgcataaaggacttgtatctcctacactatagtgtcccttcccaataggtagtgaaccatattaaatgggtaccactatatatactagaggagagatcttcaaacttccaatgtgggacaaatatcaatatttattattgtaagctttcaaactaaccactttggaccttaattactcattcataata

SEQ ID NO: 27920 - DNA, 527 bp, Arabidopsis thaliana columbia
ggtagatacatacgctatacattttccgagactgtaataatcttgaacaccctaataagtgaaaaggggaagatttgttttaggttaaaggctaagaatcagctacaaaggtgaatacacaattttgttagtagcttctgtgtctggtcagaaactgtaatgtatagtattattgatcacagacatggcatgtgctttgaactaagttctgatcaaatcctatatgtgaacttcctaaaatagtgtttctgtgcatctatatttaatgaatctatcggttttaaagttctctaatctacaaaacttgaagaatctcactaagcctaaatctactaagcagaaaacttcaatatgagtttattgatacacatcaaaacataaggattaagatgaagataaattatcatatccactcaacaaaaatccagttcaatttagatacacaggacaataaatgttagttagaaagagagcaataaatacagtaatgatgattgaaatatcaacaagaccatttagaagtagga

SEQ ID NO: 27921 - DNA, 806 bp, Arabidopsis thaliana columbia
attaaatttatacatcgttgtgttagaatatatttaagtaataattttttttgaattttatacatgcagcccaggctcaaagaaaatataagtcttagggaaaaaaacttgttggcctattattgtaaaaagatttgtggtttctaattataaaagaatgatatagttaaaaaatatttggatcttttcatatatttagtatttcagaatttgggctttttgagttataatacttggattattaacaatttttaaaaatatttagacttttttatatgaaaaaatttccaaacaaaaaagtctcgggccattgcatctcttgttcatgtaggaccgcaaaatctcgatttgaaaaaaagaggtagaactctataaatacgattaggaaatacgattttcgaaaactagtgaaatcgagatctaaattctcttaccgtaatccaaactatcttccgcagtgtggcggttttatgagtagcagatcacaggatacaaccactataagaccggtatcgcaacactcgataacagaatctacgaacttgaaaactactatatactcttgagacttactttgagaagaaagggagagatgggagagagtgttcgttcaactttttgcgagaaacgagtgaataaaatgagaggaggagccgttgcttttatagccaagagaggagcaaatcgatccgcaattaagggcgaagatcgcgtgatccgctattaactcggagtaaagcgcaagtcaaaacgtgtgcgagattttatgagccattatgactttccgtttctcgttttaaatttga

SEQ ID NO: 27922 - DNA, 536 bp, Arabidopsis thaliana columbia
attacaaataatgcaacaaagcctcataagtattttccccaaaaagaacattgtttgtcggccaaagcgcatttcccaagagcccaaggcccaagcccggctcggcacggcacgacggcggcggacgagtgtgtgtgttgttttgcataaaggacttgcatctcctacaccatagtgtcccttcccaatagctagtgaaccatgttaaatgggtagcaccatatatgctagaggagagatcttaaaacttctaatatgggacaattgtcaatatttgttattataagctttcaagctcaccactttggacctcaattactcattcataataacttcaatttttatatgtaactacactatcttatagtgctcattacaaggaattcaaagactccataatccggtcattccggtgatggccatcaccggaaaaatcaccgaagagttagccggagccacttgtgtaaaattgagtccaacaatccccacatgaataaaattgactctaacatttgagacttttgactgactcgata

SEQ ID NO: 27923 - DNA, 1327 bp, Arabidopsis thaliana columbia
aaaattatttcccatttcatattagataaatatacttttcgagacagtatgaaaataaattttaactttttttttgtcttacttcaaaagaaaattttaggatacacctttttgtatgaaaatatttttagatatcgctttgccttgggcttgaacacttatgcggtacggttatgcctattcttttgtactgcctcttgttggaactcatttttacatatgtggttccggtcaatttttcggcgactttttcggtgatgtctgttaccgaaatgaccggattatgaagtctttggatttcttgtaatcagcactataagatagtgtagttacatgtaaaaattaaagttattatgaatgaataattgagatctaaagtggttagcttgaaagcttacaataacagatattgatatttgtccaacataggaagtttgaagatatctcctctagtatataaagtattatccatttaacatgtttcattagttattggtaagggacactatagtgtaggagatgcaagtcttttatgcaacaacacacgagcgccgccgccgccgccgtgccgtgccgagccgggcttgggcttgggctcttggggaataaggcccacatagtttttggtccaaaaacgaaagcccatatcgtttgcataattaagatatattcggaatattaaaagcatatccgaatattccttatttgaattaattcgaatttaagtggttgtgataatggctacgctaatcacgccaacgtcttggacttgcgcatcactctgaatcacgcgatctccgccttgatttgcggatcgcatatctcacctctccctcgatttgcggatcgcatatcttacctctctcctataaaaggaacacctcttcctctcattctcttcactcgtttttcgctacaagctaaacgaaactctctccctttcttctcaaagtaagtcaagagtatatcgtttatttcaagttcgcagattccgctatcgagtgttgcaataccggtcttatagtgattgtatcatgcgatccgctgctcataaaaccgccacattgcgggagctagtttggattacggaaagagatcaaatctcgccttcactcgttgtcgaaaaccgtctttcctaatcattttataaagatctttgatttattgcaaatcaggatttcgcggtcctacaaagttcttaaacaaataaacaaaattataattatactatctactataaacaccttatttttttttagtttgttgtaaacagatactttttgtttttaaacctctttctttttttttgtaactatattgctttggt

SEQ ID NO: 27924 - DNA, 865 bp, Arabidopsis thaliana columbia
tgagccattatgactttccgtttctcgttttaaatttgaataagaaatattcgaataatctcttttcattatgcaaactgatttcttattgggcaataatttatgtagcaaatgttacataaaagtaacaaaagcctcataagtattttattcaaaaataacatcttttatgggtcgaggcccacattccccaagagcccaaacccaagcctggcctggcccagctcggctcggcatggcggtgcggtcgcgcatgtgatttgttttgcataatgaacttgcatctcctacaccatagtgtcttctcccaataagtagtactgaaccatatactaaaaggagaaccttcaaacttccaatgtgggacaaatgttattatttattattataagtttttaagctcactactttgaacctcaattactcattcaatataacttcaatttttacatgtaaatacattatcttatagtgctcattataaggaatccaaaaactccatgatccggtcattccggtgacggccatcaccggaaaagttgccggaaagatggcgagagccacttgtgtaaaattgagttccaacaatcccccacatgaatagaattgactctaaatatttgagactttttaatgactctataacctaaaactgacctagatttgagagacttgactttcaagagtatatgcgaaaaattagatgtgcatgagatggtagcatttttgccttgaactagtcattgttaatatctgtcaagtttactcgtccgagaggtgaatattatgtcatgaaccacttcagatttttatgaaaacctagacaacaagtgaaacccatctactttttctcgtaaaaacaagt

SEQ ID NO: 27925 - DNA, 388 bp, Arabidopsis thaliana columbia
taattaattaaccttgctcttgccgtgtgtttgctttctcatgctattagtgaaatcctatgtttctttttcagtatacgttttttcttcgattccataaaatatggtgaccttgaaattttcatacagtcctcctaatgtgtctggtatgccatatggagtgaaaccgatcgagaaacctctctgatgtgaaggatatatcagaacaatacactgaattgcatgactcatgacaacttagggtctctctcatccaaaggtataaaccaggacaaataccacaagctcaaactctaatattttggtacggaaggagtacgaacgatacaggtctacaagagcctaaaaggtgtttctatgtggaattgatgagcataggttgggaatt

SEQ ID NO: 27926 - DNA, 494 bp, Arabidopsis thaliana columbia
ctgtcgtaagtttccaaatatggcaagaaatttaatatcaaataactatataacgtctgttactttcgatggcttaatgcttgatttctactcaaagcaactcgcgttcaatatcataatgaaatgagctatacaaaattttcacttatatatagaatattttcactcagaaggccatatatatataaaccgtaacttatatttcaagcttatgcatattgcaaatatacaatctaaaatgtaatatgcatttgtgacaggcacacgtgggagaagcaggaacagctcctgagaacaccaattgatggaagtcttcgcacgctccaccgcagaatccgtacacctgatccttcattactaactatttttgtgtgtttattttagtttctttgaatgtctaaactttaactttgaccaaccctcaaacttgccataaatcaccacccctagcgcgaatgtatccacaattgaatttgatttaaaagtagcaaatg

SEQ ID NO: 27927 - DNA, 439 bp, Arabidopsis thaliana columbia
catgtcagaaaatccaatattgagtggcaaaacatagagcctgtatgtatgtaaaacaaacgaatctctgacctctagaaactcagcttgggagaagcttttgacgagtgtggtggtcttcctcttcatctcaacctgtgttgcgtttacttgtttcttctgaaatgcgatcacagctttcacaaactcctgataaactaaagcgcaccctggataatcaaactcatcagagcctggaagcctcatcctctctggatgaaactgcagacccatcaagaactgaccttcctttggatcatatcgattcggatcataaaatccttcaatcaaaccatcaggagcataagccatcggcacaaaacgttgagccagtctcttcacacgttgatggtgatacgagttcaccattatctccatctcctcgaacaacttatgtaac

SEQ ID NO: 27928 - DNA, 1622 bp, Arabidopsis thaliana
ctccaacaaattcaatggtaggctcagtgcatcccacgggcatgaatgttgtcgctagtgtaggcatgatccaacaccaacccataggcatgaccctaaaccatcccatgggcatgaaccaaaacctttccatgggaatgaaccagaactatcccatgggaatgaaccaaaactatccaatgggaatgggcatgaacatgaacatgggcgggtatggacaagggtatccgatgcaaccacaacaaggaatgggcatggctcctcctggtgcaccacaaggcatgaccggtgcctataatccaatgatgggtcaaggcggttacaaccctcagcagcagcaaccatatggtggaggttaccggtaagattcgagccaatcacggttacccatgttacttatcatggtaaaaagagaaaacatcaaagaacagaacacaatcagtttgacctggatttgtaaattttatggtcggttcaggtaagttggggtttggtcagtcatattattggattaatacctcagcttcatcagttattttgctttttctttacaaaaataattctcgaccaaattgagttttgttaggaattttgtaacgggtaaagagagagacagagaggcacaaccttcactcggggtttgctatatacatatgtattttgatattatacgtctttttgtaatacattgtccacttcacgtaacaaataacaataaaagaattatgtcaatgtatataggttttggtaacgtgaagtatataaatcacggaaaagtcaaaagaaaactgcaaaatatctgaaaagaaacgaataaacggtggaatgatgactttatttttttggtaacaaaaactaaattgtaaaaaacataccacgtaatgcacgtattaccgattgaagtgaatagtcctcggaagaattttcattccgtataccaatgtctgaaaaagaagaaaaactaaacaagtactaaactgatgcaactcacacaagtcataattgtgtgaattttcacttaggttcactaaaccagagtttataccaaacaaaaccgtactaaactgatgtaactcacacaagtcacaattggtcgtcaatgagtcaagagttttttcatgagcattaaataaaagaatcaaaagaatatccatatatccatcattttaattcattacaattcattttttttcagatagaaaaaaggataacgaaaatttcacaaaagcataacgaaaaataccaaccacaccaacctttcccatgatctaaaaagaaagaaaaaaaaaaatcagtattgccatgacgacaaaaaaaggaacaaaaacaaaaaaataaaaacaataaagaaagctgaaagtttctgaagtctctctgcaacatttaatagatgcgacagtaaacataagaacaccaaacaaaaacgtgatcagcgacggcaacgaagacggcgaagaatacggcggacacgaggattcccaacgatcagattctttgacattccacggcggcttagatatcagcttctccgatccgctctctctgtttgtgtaaatcatggtgatcgcggctgcttcctctttttccctcggtacttcgccattcttcgagatctctcttca

SEQ ID NO: 27929 - DNA, 692 bp, Arabidopsis thaliana columbia
cacgaccacgagtattattttattttatgaaaaggtatcagtatcacttggaaggaatatgtactgttaatagaaaaaattaaatcaaaacgataattgttgtctttatttaatttcccatgtgtattcgcatattctttggttgatatagaatcatacgcatattctcgtttatattctttgccgtaacgtgtgttcttgtttttcttgacaattttcttctcatgtttcttgtctgtctgaaggttacaagtaaagtctcaacgtcaatttttttttttttttttgaaaacaatgttaaattatattcaaagaaaaaataacgtttgtacaactagtgcgtcgtgagtttgatatagctaacagtacacaaaattctctctatatatatatatataaagtacttttaatataaaaacaacatacaagctaattagaaagaactacatagatggtcttgaaaaagtgaatattcttgacacagaccaatttcaacacaagtaattaaaaataaatgttgtcgtaagaatatcaaccttgccacaaattataaatttccagcttatgggtgctggtagttgcgtcaattactatcctagcagatttagtaaagattttatttcccccagctttatttgacgtcacaccaattcagtggataaatacccatgacgacgtgcatacttatgatt

SEQ ID NO: 27930 - DNA, 476 bp, Arabidopsis thaliana columbia
ttttataatcggatcatcctcatgtaccaacaaatctgttaataagttttatatttcacaaagtgggaactatgagcaaattagcagattgatactagttaggaaaggcaagacagtcatatatatgactatattccatccataaaagcatgaaagttacttacttcaaatcacaaaccaatgagaaaatataggagataaccacagttgagacttattaacactaaattagattaatatatactaactcgccactagaccatcaatgcaacagctatgaacactaacctaataaacgaaaaagattccatgtgcgttaacattgaaagtaacgtaaatctcaaatacgaagatgacaaaacaagggttaagagagttcccagttatccccaaatcgatcttctctaagtgattggctactatcctttacaagccgcaaataaatggatcatgaaaacaaagaacatgcaccaaga

SEQ ID NO: 27931 - DNA, 567 bp, Arabidopsis thaliana
aacattattataaaaacggagatatatttaaattaaagacaaaccctaggtaatacattcatctccggtgaaaatcctccgccggaaatataaccttcgaagccaccgccgtcgatccaacagccaccgaaaaatcagcaccgctctcttcctcatcctcatgctgataatctcctctcctttgctgatgcggtggcattggctgcaacgaatgttctaagttagtcggagccatgacgtcatagctgacggctgctgcatctgccgtcatggtgaagctgttcatggcggctccggcgagagtggtggaggcggaggagttgttggagtattcgggttgttgcataacgactaattgttgttgctgttgttggtgatgagtttgttgttgcataacgttggccattgcgactctactgtttatcagttgtgattgcaccaccgataactccgcctgtagcgaggccacctaattaatttatggttagaaaagtattttttatttaattatgagcatcaattatttattagtcttaatatagcataggaaatgaatttgcattttac

SEQ ID NO: 27932 - DNA, 1759 bp, Arabidopsis thaliana
caagtcaggtaaagtacatggttcatctgctgcatgattttccttggtttccccatcacctttagcctggacagaagcaggatcgtttgcttttttgcaagctaatttgtttttattgccatatatgggacgttttgaggaatcaccgtttttatctgcaacaagaagacttccagcatcagtcaacaccctttttctgaaagcctcattcttagcagcatcacgcttttgctttgctgttagaatcaggccttcttgcttcttctccattttcctgatctttctcttctgcctaatctcttcagcttccctttctcgctcttcctctatacggcgctcctcttcctctttcctcaatctctcttcttcttccttcttcttcccatcttcagcttctttccaccgcgcaagagtctcttgcttctctcgaacatgtttaggaactttcttttccgctactttaatctttacatctttcttcccttgtctatcctccttagcctccacagaagaaatagctaaagaagcacttgctttcttgtccttgtccttcttctttttctttttcttcgctgtagctgactcaacagtcttttcttctccgtccttgtcaacagccccatctgcagatgcaacttgctcaggttgagctagagctatctccgcttcaggccctgttgaaacagtagttgttatcccatgttgagcaagaatcttgtccgcatcatcatcttcttcacataccccatgcttgccactcttatccttcttctttttcttactcattgaagtttctccaaccacctcatcactcctaatagaaggatttttgtcgtctccatcctctgcttcctccttgtcatcttcaacatcgagaagagcaaagctaacagacccgcctttcttcgatttcaacttctttttccgagcagaaaaatcaatctcctcagctttaggtttctcacatagcttcgtaccaatagagccatcgtcgtcagtcacacagcatctattctttgattcaacacctcccatggatgagataagggggagacatcacgccaccccacgcactcgaattcctcggatccattgatagaaatcaaatatgaatatagcctgtgattaaccccaataccgaaaacaaaacatacaataaggtatccgatcattaactctagaaacaacaacaataaatcaacaaaatcaactacaatgttcagagcgatagagaagattacctttttctgtaatgggtttaacttcatattaggcaaaaacaaactcggaagattgacggaacaaaaaacaattcaccggagaagatcaggtctttcaggagaagagtaagcaggtgatttcttttcgttgcagagatatatttgagagctttagggtttctgaacgcaattcaggtttgtcgcgtcgtatttataaatttcgatcgaagaagaaagcttgagtaaggagaatttataacttttaggttaaaataatcaacgactgcgttttgtgagtctccagtttttatttcattaatacatggaaattggaaaaagtcgaaaacagaagaaaaattcttcaaaggaaaaagtcacaaaactaaattcaaataagaactgcacagatctctgcgattagctcaagggaggaagacaaagacgatcatctaagtcagagataacaatgtctagcagtgatgatttagatgaagatgagctacttcaaatggcgttgaaggagcaatctcagagagatg

SEQ ID NO: 27933 - DNA, 791 bp, Arabidopsis thaliana columbia
ttttaacaacttaaacttctttttttttaaaacgtttaaaccttagttagcatcagcgaattctaccaagacattaaaacagtgttaaagagtcacaatgttttggttttgtttttttgatagaaatacagtttgtttgtttatttcttcttactagttttagcctcaaattagtcacaaaaagaagttgatccctcgagtaacaatttcggtgaaagtggtggttggaattttttatcattcatagaagattaggtgatcatttattcacttatagtcggtaatgttattaagaatgttggtgtcacagatgataactgttcttagattgctatatagattgatcattttaaagctagaattaattaatatctacgtctttttgtatgaattgagatagaatgtgagtgatataaagtgtaaacaactaacaaaataacacgatatatcataaatggatccttattataaactctagcatttggatttttgcgtttgcttaacattgtacaaagcaaattatttactgatccagataagatatcacatggaatgtaaaaccgcaaaagtagcgaatagtacatactttatatatgaatatatgtctgtctgtatccagtgacacatatatatcacactcaccacaatatattcatacgtcggcatagaggtaaatctctctcatccgtgatctgattttctatgtaagggacatatatggcaccaattaccagcatttgactttgggtagaatgacaatgacattttagtgagtcatagtcactcgtgaa

SEQ ID NO: 27934 - DNA, 489 bp, Arabidopsis thaliana columbia
ctcgaaccaattcatgtattatgtataagctatattctcttagataataagttaaaaattgggttcttctcttctccgtcttcttcgctggctctcatcatccataaagtgaaaggcaacgcatagaagagccatcactcacaaacaaagaaaaggcaaaaaaaaaaaaaaagtcctccaaaaacattcttctctttggcctttactcaaaacccacacacatctctctttctctctctctggctttctctttgtcggaagtcatggacgctacgaagtggacacaggtgcttaaaagatcttcctttgcctcttctcttttgtttcttcttcttcctattaactacttcttccttttttctctcttatctttctcttactctcttccctatccgtgaaagatttcatacttgtttatatgcatatatccgtgtgcatatgtgtttgtggttatagagattggagatatacgtatttcagtttgtttgc

SEQ ID NO: 27935 - DNA, 570 bp, Arabidopsis thaliana columbia
caaaggtaaaattcctgaagttgaagagattccattggattggtcaaaggataacaagaagaaatctactagttcactggatggattgaaattggtaaagcctgttctgaaagatggagtcaagttcgaaaggccagtgatgaagaagccaagccctgttttgaagaagccattggtggaggctgttgctgctccaaaggtgcagagattgcctaatgttatattgagaaagccgagttcgttttatactagtaatggtgatgatgaggagtctaagttgcggttgaaaccgaatctgacattgaaaatgagaaatgagagggaaaatgagaggtttagtgatatgacattgttgagaaaaccggaaccagtgagcgtagttgcagaagaggaagacaagcctctttctgatgatttaactatggaggaaggagaacaggaaggtggaacatattcacagtatactcttttggagaagccagaagcgaggctccagcctgtcaatgtagaagaggaagttggagatagcggaggagtggaatcatctgagatagtaaacaactcaattca

SEQ ID NO: 27936 - DNA, 551 bp, Arabidopsis thaliana columbia
atcactattttaacgaaaaagttgcataattgcgttttcccgccaaaaccaaaaaatttgagaatgacattttcttccaaagttataaaattgcattttttcatcaaaactataatattttctttccgaaactaaaaagtatgatttaaatgaagatatgtcatttttagtcattttaatacaacatgcatttagatacagatacaaattgtaataaactaatcaaacgaacaaagattcatttagatgcttcatctagatggactaccggattaggaaacaaagaacactcaaatgcatcatttaggtggatcatctggatgcattatccaggtgtacaaacgaacatggcctataacctgaggactcgatctcttcaatggaaagcgacaatgagccaatcttcttttaagctgcacaatagtgatgagtgttatataaaaaaaggaaaggcatcggtcttgtgaaaatgagtttttaacgagccagcaccaatgaataagagaaaataggaatatgatttgtaaatatgttttttaaaaaattaattt

SEQ ID NO: 27937 - DNA, 572 bp, Arabidopsis thaliana columbia
ttcacttaaagactactagtttactatgctgtgaatttgaagattgccctctttcaggatcaactgaaataagcaaaaaaatctatgtttaaaaagcaagcaaccagcatactaagctctaactcttaagccatgaatgaaagatatatgtagcgcataagttgggaattccccgtcataaggagacaaaatccataccaggttgttgtgttctataactcttcagatcggcagtaagggatgggtctatctgcctctggttgccgactagaccattactaaaactggaccaacttccgtcaacaacctgagactgatgctggtcttgggataggccctcctgtccaaagaaattgtgggtcctctctccaaattcgtttccaggcatagattcagcttctagaaattatttttaaatatctggacctcgaaaagaaacgaaaaatatttcaatcttgtgtctcctttgatctaaaacaatcgttgttttctgcaaattaggaaacaaaagtgagtcaaatgaaaatcatcggacaagatcctcaccctgattcagtttaagacaagaaagt

SEQ ID NO: 27938 - DNA, 555 bp, Arabidopsis thaliana columbia
ttctgatctggataacaagtagtctccaatgtgccaacgagaaaactccttgaccaataggtcgacaatagcattcttgttgcattgcctatcacgtcaagaaccggtgtgcagtcgcagattatagatagttgatgaagttgcacaccaatgtaggactaaagtgccaaaggctgcaatgattcttttgtcaaagaaataaaaagatgcatttaatcaaagagataacaagaaaatgggatacactagagtcaatttagtgaatggttattggtcttccatattaggtgtgtctttattagtagtctcctaaaaactgacgttttcattgttgttttattcttgtttatatagtgaatgattatgagagactaattatctaaaacatgagagatgttaactaacttgaacatttatcgataaataaaaagaaaattagatattaaatttttaagtaccatttcatattgatattggtcatacatgatacaaccctgaaaatacaacacatacaagagaaccaagaccgtaaaaactaatgcaggtgcgagttta

SEQ ID NO: 27939 - DNA, 592 bp, Arabidopsis thaliana columbia
  unsure (1)..(592): unsure at all n locations
gaatataagatcgaaggagagacaatattgaactcttttctgtttcttctcgaggtccagatatttataataatttatcggagctgaatctatgcctggaaacgaatatggagagaggatccacaatttctttggacaggagggcctatcccaagacagccatcagcctcaggcaggagatggaagctggtccggttttagaaatggtctagtcagcaaccagaggcagattgacccatcacttattgccaatctgaagacgtatagcactcaacaatccggtatgcattttgtttcctttgtgactggggcttcccaacttatgctctacatatatcatttatgttccattcatagcttagagcctagtatgctggattatgctttggttttccgagtttgaacatagcctttttgcttattccagttgatcctgagagaggacaatcttcaaattcacagcatggtttaaattttgccagcagccaatgaggtccgattacccagaagtgtattgcgagaacacagcaatcacaactggttaatgcatggaaccttatngtgcagcatctcaaatgagggaagtttgtgg

SEQ ID NO: 27940 - DNA, 991 bp, Arabidopsis thaliana columbia
gttaccgactagaccattattaaaactggaccagcttctgtcaacaacctgagactgatgttgctggtcttgggataggccttcttgtccaaaaaaattgtggatcttctccccaaattcgtttccaggcatagattcagctcctctaaattatttgtaattatctgagcctttgaaaaaaacacagaaacaagttcaacattgcgccttcgttgatctaaattccgaatgtgtaagaaaaaagggaacatataaacacctctttccccagaattcatgagctacctccaattggcatgctttgaatactcataggttctcctgctaaacaaacaaaacagatactgcaaaatttagagttgaacacaacaagtgaaacaaaaacactagacagaagaaagccaatacaagtgttgtttctgcaaagaggaaacaaaaaccacagggcagcaaagtgagacactagagaattgatgcagagccacatggtacaaggaaacagaataagcattgtttccttagattggaacttagggtacactgacgcctaagttccagtcaacatcagaaactcttaacacctaatcaagtaaacttggagagctcatttcagtaaacagcatcaacttcattaaacaaaaaccagctgaaaatttccgatttcacagctataaacactcttatggcagctgaaaattaagctaatttcgaaaaactctacagaatttgattggaaaactcgagaacacacttgagatcaaaattgccgcaaacacaatctcactgcaaatcgaagctatggttaataataacatgaacattacagtaaccgagaattcaacctcaaacaataacactacctatcgacacggtacaataattgggtaaaaaaaaaaatcatttctttttaggatatatagcaagaattagggttccacagagggaacagagatgtgacttcacacttgtgtacgtttactttcacaaatgg

SEQ ID NO: 27941 - DNA, 478 bp, Arabidopsis thaliana columbia
cacctagatctagaggatcgccggattttctaagtcggaacctgctgtagatactcctatggcaccctcttcaaaggtaaatgacttcagtcttttatctggtgtcatagagaagtgcacacgcctatcatgcaatagtgagcaagcacccaactcgttctgatccactagttaagtcttcaggtcctcggaaccacaactttaactctaccaccttgtcctttggaggatcttctactgctactgtttcgagcacgactactcccatgtttggtgcatctaccaccaacacgccgtcaccttcacctatctttggtttcgggtcaaccctcctacgactccccagcagccggtatttggtaactcagggactccatcacagtcgctgtttgggaacacaactcctgggtatgcattaggtgcacctaataaaggatatggtacaacaatatccaacaagtgagcatggaagtcagta

SEQ ID NO: 27942 - DNA, 534 bp, Arabidopsis thaliana
cacgtaccgagcctcggcatcagcgtgctccgggcgtcggcctgtgggctccctattcagaaccatgaaagtggaggttgctcacaagcggcaatgatgcaaaccaaaccaagagtgatttgctctgctgtctaatagtgttgtcttagcactaaaattgaaaaacaacaaaagaatttaagacaaaaaaaaaagaaatgattgttaatccaataatccccggaaaaaggaaaaaaagtacagtgagaaagcgataacacattctcagcgtcagaagcttacactgctctatacgacaaaaacctcacctgcttcctcctcctctatgagttagtgaatactgactgaataagttttcacaatcctttgcatacatcacaaaacggcatcgttttgatgtcgctctctccttcttcctcgccggctccggcaacttccccgcctgccatgtcattacctccggcagattccgtacctgacacgtcatcacctccagctcgtcctttgtctcctcttcccccaccattgagctct

SEQ ID NO: 27943 - DNA, 746 bp, Arabidopsis thaliana columbia
tacattttctgtttgtgaactagtaataaattgatatgttgtttaattattatcatcaacatcatttttctgttacgagtttattgtcaatacttttttgctgttagacataaataataataaaacagaaaaattggaacatctaacatggcgtacctttagggatgggtcatggtcaactacatacactcttttataaaacctcttgaaactataattcgtttatagttcacaattatgtagatgtgtgttatttcaactatattcctataatatatatacaagtgctcaatccagatataaaagtgtgaaacgtaattaatttgtttttataaagattttcaaagaaaatccgaaagaagaaccaaaaacaacttataatttgtcacaaaaatccaataatagttctaataatattaaattctaaaacgtctgacgacgaggaatcaataaaccaaccaacataaaatgacaaaagtatgattgtcgttggacctttggcgtgagattggatcgagacactattgcttgccttttttttgttgcttcttgctaagtattttctatgcaatttaaaatttgaaatgccaagcacgctggaaataaacattacgtaaataatattcaattatttcactaaaattcaaattaatatctagaaggtgtattagtaagtttatataatacactattatttatttcaaattttgaacacgtatactaaaaattagtgacaacttgaacac

SEQ ID NO: 27944 - DNA, 534 bp, Arabidopsis thaliana columbia
tgtcgtcttgttagacataaaagttggacttggacccatcatagaaacacagaaagggcggttacctttccaaaggtcagtttttttttttttttgtctcttcagaatcccaaccttacaaactaatatcacattcaatcgaattgaagtaacatcatcacttaattatgatctaaagagtaagaattcgttataccaaaaagaattagaacggcagaatcaaatctaagcttagaaacaactaaagtacaagacacttgaaacaagcagtacatttgactagaccaagattgtgtccctccacttaagttattatagacccacgactactttgactttgttttgtctgcataagatctatgtctcactattttcaagttcaaatataagctaataaacgaattcagatagtgtaacgaaaatattactttactacctgaagtacatatatatatagagagacacgagataattgatgtgtctcgaccgttcaaaactaaaagaaggtatcaaagaacgttagaactgacccga

SEQ ID NO: 27945 - DNA, 525 bp, Arabidopsis thaliana columbia
ctttaccgttctcttgcttgtcctcttgatggcttccactggtattaattacacgaagctatctattatccactcgagtctaatttgtttaattatgttgtgaagatgaacttgatgaatatgtcaacatgtatgtaggaatcctagagaccgaggctgcatgcttcaagttcttaggcgagtgtggggcggtcccgttcccaggtacaaatgctgattgcacaagctgttgcgtggggaatttcgggtctgcagtgtgtgctggacgtgttgaagtcgagggaggcgtgaaacactgccattgctacggaacgtcttgataacatcaacaagtctaacctttgcttccattccgtgtgaggacattatgtgtgtgtatgttaatgttcaagtttcttttgcttccaaataaaacatcaagggcaaagcttaactatgcttgctccaaagtctaagctcatgttgtgtgcactttcgtttctttcttaatcgtaaacttgttttgtgtgtttgggtttgtgttca

SEQ ID NO: 27946 - DNA, 468 bp, Arabidopsis thaliana columbia
ataatataaactaacacaaaagccgcatacaatctatgaaacaaactaaagatcttcgaaaaaataaaccggaaagcgtacctagagcaatctgcagcttatcagtgagaaacaggcggggccttgagatacgatccgcaaaggaatccaagacatcctcaagcctccttcagtataacaacagagataacaagtttcaaaacaagctatacagccaatctgcctatctatcatacatacattggctccgtaaacgaacaacatcaaattaacaacagtaggacgaagaacaaacttacttgtaaaccttccagaagagaaagcgaaggccttcctggaaacaaacagaggtgataacaagtaaagcataaggccaccacacattggctttgagaggaagaaatggtctccataatcccgacaagatgatcagactcacaagccacagcaacgtactgcattacattt

SEQ ID NO: 27947 - DNA, 215 bp, Arabidopsis thaliana columbia
tgcaatattaacacctatttttgcatattattcattaaactttaactatttattcatctaactaaatatatgtatcatttattcactatttaatgtatcaaattgaaagtatgccaaaaaatataactgttaatatataaagtattaaccaaacttttttaagtttttaaattggtgaaataattgttaatttgtacttgctagagtactctgaa

SEQ ID NO: 27948 - DNA, 227 bp, Arabidopsis thaliana columbia
tattgactatttaatttatcaaatagaaagtatgccaaaaaatataactgataatatataaaaaaaaaaacaaacttttttaagtatttaaatttgttaaataagtattaatttgttcttgctagattactctgtaaacttttatttggtataaaatcttagcattaaatcaaaagaaatgaaacaaacggaatgatacgttacacttaaatagaaacgagtcaaaa

SEQ ID NO: 27949 - DNA, 509 bp, Arabidopsis thaliana columbia
attttttttaatgttattttaagttgtacgaatattataaggtaaaaattgtgacttttatgcgtgtgaattggcttttgtttccatttgcatgtaattgttttgcctcgaagaaaataatcactgatccgttaagtccttcttttttttgggtcaattttgctattttttttacatatttcaagtgttgtttcattgggatggacgataaagttaaaagtcaacggtaataaccgaccatatgcaaaatgagatttcaaataacttgagacgcggagatctttgttttccatttgcatgtaaaatctttcttttcaaaatattaaacagtttattagattgtctaatgtggattcctcttgaatgttccacaatgtggttcgattatataaatcatttccaatcttatcggattcttcgaaatgcagattgtgatggagtgtaaggtcaaacatgtgggcacgtgacgttacagtctgagcaataaacggtaagcttattttccttac

SEQ ID NO: 27950 - DNA, 842 bp, Arabidopsis thaliana columbia
atactatagccagtacttgttaattgtgatgtaaataaactaggatgtattgaaatactcatttacgaaattagtgttttgtttttacgtggcattagtgatgtgaagaaatgaccgatgtgagaaagaagggagaaataaatataatgggagtgtcgatggatggattgcagcaaactttaacggcgacaactcgccgcttacctggccgtcccagtttgtgacctttggtgagagtaaaagggcaaaaatccacgtgggctaaaaaatggagccatgtgccgccacatcatcggtcaattgggaccaaatacctctctatactacttattagtaacttgactatatatcttatgtttttttttataatactaataaaattatgggcgaccgaatcaaagtggtttattcctttttctggctgccgcatctttactctccctctctggtcaactcctacccgagatctatatggagtaccattttattaaagaaagaaaaacaaaaacgaaagtcagttaatttatctctccaaaatatatatatatgaccaaattaaatcgcattgcattaggaatgactgcatgcttaacatatatcgtgatatgcatggggtgtgttaatcataaaaaaatgccatataatttacaatgtacgtgtatattgtgagattaatttacaatttgcgtgtatatctctagtttaagagtatgttacttggaatgattttaaatactaaggaatagagattgcgttagaacgcgcataagacatgtttattaataatatacacgagcagccatacctgcaccacgtgttaccccattatatatgttttaggt

SEQ ID NO: 27951 - DNA, 978 bp, Arabidopsis thaliana columbia
gcaagtaattttagtatgccacgccgttcaacaaacattgctgcaaacttccggtgcgcaccaaagcgcaaattaacttcatgacatcaggtaacaaaggagacactgtcgaacgatcatctaactgggatgtacgttccagcagcacaatgcatacatcaacacccttttccatggagtacaggcccgagaacctcaacatattctcccagtatctcaaggcactggatgcaatatttttcttgtaactgagccaatgattcgatatctggaagggaaacttcactaacatccgttgtctgatcagatgtgacacaagtaggatttctgccaccaaccaaatagcagagttaaagccctaaacaactcagagataaataattgataaacagcaacgataatatccacgacatcatagcatgaccaaccttgaaacctctgcggcatctatgactgtaatagctgctcgagtagcagcagacacagcagcttcttcactgccagaagacttgaattcctggataatttaaaagaaaagacaatcaatataaatatcagtcaccctaatccaccgtttcattagggaaatgaaatcactaacagctaagcaaaaaaagaaaaacatacctccaaagcagcagttttaacaagctctgcagcagcatcgccagctgctttagctgcgtcatcaggagcatgggcagctctagcttcggtttcagcagctccaacggctctctttactagatcagttatgtttttagttcctattatgcaaccttgaaagcactcatcgttatcctctctttctatctccataataccagacttcattttcccaagacatacggtcacgtcttctgcatttctgccatctgaaatttttgatagatccctatctctgacaagtagacgacctaatctaggagatgccaagagaacttctgtatcaggtgcaccttcgtgaaccctcctcta

SEQ ID NO: 27952 - DNA, 676 bp, Arabidopsis thaliana columbia
cacttgagactaggtttaagccaagcatattgatccttattttgttgcatgagtctgatactgggatatatcataagtggaaatattgcaaagtattttcaaatctcagttaatggagaggtgaatatgaaattatattgatttgttttgtagttcgccatctgcgttagaggtgtggtatgttgtgcttgagttgcatagtataattatcggttgttgatctctctgtcgtttcgtgtctctgatttgtatagactgatatgcatatctaatacaggatatataccttttctatgtttcttacatatcgtttttaaattacgttttatttgcttctggatttctcagttgtcttttgtaactctgttatgttgcagcctttgcaccaatgaacgccgcagcaccagactctagagacttgaattggaatgcacagagacagccatttgatgctgagagatacactcggggattgaattgatcatttatcgcataggtttcaggttcttggtactatcattttcagtgtgtcacggaaatgtagatctagcagaagttcgagtcataacctgagtacgaaagtttatctgacacaacacggtttggcatctgattgtcgaccacattacaattgaagcaaacgtgctacagaacagagtgatcgcacttcctagac

SEQ ID NO: 27953 - DNA, 589 bp, Arabidopsis thaliana columbia
gattctttattggtaaatcttcagttcctcctaaaactgacgaagagatcttagaagatgaggacgatatccgtagtttattggataaactcccaattccatcgatgttttatctcggttagtataaaccttaacttttatattcaaattattattatatgtaaaaacaacttgttatagtttgtgatcgtgacctataattttatgaatctttcaggcttctaaaacgggaggagcggacgacgatttcaacatgtttttagacaaaaaaaaagagtaccaatgttgtctttccttttttctctggataaaatttggaacaatgttggattatgcattttatttttcatttttttaaaagaataatgtgggattattgttatgaaattaacttctatatggcgaaatttcatataattgttttgttggaaattttataaatttggagaaaaatatctcatagttgtcacaattcacctcagcacatgtgcatattatcggtaaatttacttatggttattgtgagaaatacattaaaaaaaagggtgggtagattagagataattaatatcatgaagttgatttaagt

SEQ ID NO: 27954 - DNA, 724 bp, Arabidopsis thaliana columbia
taaacgagaagctactgtagacgaagaccctcgaccaaaagctttagtcttatctatctccgttacgaatctctgaacatcgaattggcccagaagagacacaagccttgggattcacaaaaacaaaataattatcgaactttcaccgaaagtatcagaaaaaaaaaaagttaggatttttgaatttggggaggtataccagttgttggagaaaggaagagtgaggactctttgaagagagaatccaccaccgcctccatctccggtgttgggacggataggggagaaggaagggatgagaggtgaggccatgaagcggtggaagaactcaacttgcttagggcgagatagacgagtgcctctagagagacctagaggaagaggatcgtcaggaacagctcgtgcggtgccctcgagcgtcaccggagttgacatatcgaggtcccagatgtctccctctccgacccatctcattctgttcatctccgtcgtctccgccgccgtcgctcgatttctacacccagctgacctggagatgaccaaacacactcttactctggatttgttcgataaacaccttgccgtttttggtttttataagaagaatgcttcccgtttaattaaaccggcttaaagaacaaagaaggcgtctaacggttaaaagaatcgatttattccggttatggattgaattattcggtttgaataaaagagtaggacaaag

SEQ ID NO: 27955 - DNA, 879 bp, Arabidopsis thaliana columbia
gctactcttggcctgttcagcttccaaatgtagtttgattttatcataagcttgtttgtgttgtctcgtcgacttatagcctgtagatctaacttcgttgctgctttcatcattagagtcatcacaagaaacatcagagtacatatcagcatcatttttatcccgcagatgaaaatcagtatcctctccagtctctttgatgttagccttcactttagaccccaatacactatgatccaatctactagcatctatacccttgtccaaactcataaaaccttcatcagagtcatcacaagacacattcgtgtaacttccagtatcattttcctcttgcagatccaaaaatgagccatctctagcctctttgctgttacccttaacttgaaatcccaacacactatgatccactctagtaacatcaaattgctgagatgtcaaatcttcagtaatcttccgagacttcttaggaacatactttgtcagacctgatgaacagtaatcccgctgctcagaacacaagattctaggtacagagtgtctcttcgccctacacaatatcagaagtgaaacacttaggattaaaacaatcaccatgaaagtagaagatcacataacaaatacaaaacaatcagtaacaaaagtgaagaagatagccacttagaacttcctcaacagccaaataattaaattctctcaaagagataaaactttgaagcatatgtaaaattcaaatgtgacaatacaatgaagatttcaacgaagaagaaaaaaaaacagatttatgggattttagtttgatttcggcgattttgtattacgaattgaactaaaattataaactaaccatggaatacggaagaggcgatgatgttgaat

SEQ ID NO: 27956 - DNA, 669 bp, Arabidopsis thaliana columbia
agataccaaactgagaattttctaatgcgcaatggaaagtatgtggagtttccgcatagataaggtgactttggcttcgagtgaaaaagctatagttgtgtacttaaaatccaatgcttggcctgcttctttgtgttatcattcttaggagattgcaaatattgtcagcatttcaaagatgcaaatatgtatgtcaatttgtcttgtgcatgagaccgatctaatctgaagcattaatttaaaggtagcaaaggaacatgtttcatcattcaaagatatctcaatgcagataacaattccaaatcaatgaaaacacaagtggtggaaagagatatttgaatagatggttttcgcgccaaagttcgttaaaatatcaagcttaaaatttaaacatccaaagatattgtttatgtaaagaatatgtttctcttaaccttagatattatttttaaaggaaataattactacttttagggccggtccaaacataatttgccgtcacctgttaaaaagaaattacaaaagttaggaaattaggatcgaactggtcacctaaagcggatatccatcaacttttcggaaataaactttttatgaaatgatgcgcctatatatttatatagagagttctttgcctataaccttggtttcatgagatttttaggcttt

SEQ ID NO: 27957 - DNA, 689 bp, Arabidopsis thaliana columbia
cccccttcaagaaaactttattcgcatcttccaagtgattgatcctcatgagctcctctataaaagaccacaatcaaattataaacgattactcagtaacctcaatcctggtagacacaagcaacaaccatttgattctaacacatagtcttagtagtaagagagaataccaacaagaatgagccaagcttgacgaatgtcatacttaagcttttccatagcggcgaggatttctaggcctctcgtagcattccctttcgaaccagagagacgaaccaaagcaatcatagtctcaggaagcggacgttggcctgcacctagctcctttctcagcgagtgcatctgcaatcacacacaaacacacaccaagcaaaaaaaaaagaagcaatctttcagttcaaacacactcaataagctatgagaaagagtaaagttctaattttgatacaaaaaatttgtaaagtcttaaaccataactcaagttctataaagcacaacaattcaaattcgatttagtttaagctccagcattgtatgatttcttaaaaacataaagtctacgtctttaatttaagctatagagagaagcatataccgcgccttgttcgtcgccgttaagcgcgtgacgtacaccaaaccatggaaagaacgaggtccagggctaagccagcagcaatcatgtcatagat

SEQ ID NO: 27958 - DNA, 494 bp, Arabidopsis thaliana columbia
gagcaattgtcggagaaaactgttttgcaaaacacttttattcctttcttcttcaattcccgatctctccccctttatatttattttattttatttcaatgcatctagcttcctcctgtacgaaaagtcgattgctctttagaaaatcacaagacaacactttagaaatgtccaaaacttactcgtttcattaaaaagtgttttaattaaaacgctccacaaaagacaaaactagttctgagaagaaaattttgcaaattcaaaagaataatgggcagaatctgatctgcaaatcggtagtgaatagccgaagtagatttgctggaaattggagaacgttggtgagaagaacataaaccaaaaacaaatcccaaaagtacaccactatataactaaatgtctcatgatttcgtaatctcaggtcttaagagtaagaaggttgcaaaaacaaacaagatatcttccattgcttcataatgcatctatctcaccgc

SEQ ID NO: 27959 - DNA, 721 bp, Arabidopsis thaliana columbia
cccatctcacatcttagacatatgagtctgttccaaagctagaccttgtcattatattattactctgttgttgacttcttcctcgctgatactcgtggttgaactgttgtatccgtcgcctttgtttatgatttctgagttttcgttgacatcttcaatggctcgtccgcctaaactgagtttgtttggaggactatctggattcatcacaacagatttctcactgaaagaaccaatctccacgctctgttccgacataaagacagaatctttctgatcaacttctttgccagatagagaatcttcctccatgatctcattgttgccgtattcagaaacatctttgatgttcttattacggaatgcagatgttaaagaaacgtgagaggtctctgaattcatcaaatccagagagcttcttatcttatcaagtttggtctctgcactagcactgatctcatgcgagctctcatagcttgagctggagaaatcagaagccaattcatctttagcacagatctcatgtggttctacaagtgaatctttagagggatcttccttagctgcagtgttcttcaaagagaaatggcatctatggcagagaagttcctttgcaatgggatcataggagccatctacttcatcagacacatatgtagccttctacctcatggaacctttgttccttagtgcaggtttagctccgcctcctcttggaatg

SEQ ID NO: 27960 - DNA, 605 bp, Arabidopsis thaliana columbia
cagccgtttaaactttaaaataaaaataaccgttgttaactctttgaacagaaaaaagtacaaacaacgtgattttggaaaatgagtttagagtttgattaatcagcagtaacggacttgaagaaattcatttgacctattacccaaaatctaacggaagaacataacaatttgacattgttagtgacctgtttaaccttaatcacaacctttcaacgatataataactatgcactagaattcaacatacatagatagacacaaagctaattatcaccaacacatgaaaataaaaactcgaaaatcaacaattttataatctgctagtcaacgcaaaacacaaaccccctctcaaacctaatagatcgatcaatcccatgaccaaaacgattctcttcgattcatacgtaccacgaatcttcgtcaaagactacaattatctttagaaaacaaagaagaagaaaaagaaaattaaaacttgacagaagagagattataaattaaaaacaacgaacgtatctaacttgttttttcttcgcgatttagaaagatggtctcggagttcccaataagcttcagctggcaattgaacagaattcataaga

SEQ ID NO: 27961 - DNA, 607 bp, Arabidopsis thaliana columbia
cgccagtgtgctttaaaggacgaccaacatcatcaagaagatccaacaggataaaaaaggctaaccggaaagcggttcacagatctcgcttcgtacatggcaggcctattgacgctgttgttttttcaacctagagtaaaggaacaagggtaagggaggatttctcccccctctgatgagttgttagtaagtcgggaaacttaacagtaacaacacaaccagtatgatgacgagcttcatcataaccctttccttatacaaggccccttcttcgggaggggctttcccgtttcagccccttgctgccccccgattgttgatgagcgccggaccccgcgcaatgctttcccagaggcaattttgccttccccgagcggtcacgcaaaacgctgcaacgtcctgagcatttgcaccttttagcggaacgagatataaaaaatccccggctttttgggccagggatatgtgttaatgaaaccttcttgacgctgattttttttcaacctaaagtaaaggaacaagggtgagggaggatttctcccccctctgattggctgttaataagctgcgaaacttacgagtaacaacacaatcagtatgatgacga

SEQ ID NO: 27962 - DNA, 954 bp, Arabidopsis thaliana columbia
catttattcatattgcttaaatatgaaatattagcttaaaattttcataattttgccaagtttcttttcatttggtaaaaagttatctgaggaaggttggggataatgaaagaggacaagtgattaaccaccgagtatctagaacttctttttttctcttttatcttaataacgaaggcgttgttaatatccggaattgtttgcaacgaaatttagttgtatgaaaaaacgaaaaaaaaaatcagttgcatactattgcttcatgggcctatattgggttggcaccaaaaaggaaaaccgcatctcacaaacatgtcggtcgtaaccgcatggctgttttcacatatgtttctaagaagtaagatcaaaccgataattgacatgtttttttgttttgtaaaatatgaatcaaatttatgtaataaagatgactgatacaggccacaatggtgatgaccataaacttgagctgcactgggcaccagactatatgattaaggtatatttgatgaattgaccaaaacacaagtgtgtttaaaaatcttactgagtaacatacatatcctttcttttcttttcctgtgttttgacaggtttccagcatctctgtctgtctttacactagtaagtataattttttctatgagacttataatgttcaataattttatgatatttagagaattagtgacgtttatgatgatgttttggtggacgaagaaactcctccggttttctcaagatcccgttgtcttgctcgttccattttccgctttcgccattcttccaatgctgagcggataacaaaaacatttgttacatacctaaaccttcatgtatagttttgtttctgatctgaattccatagcataaacaagacgatttcgctattatgtgtcctttcaagctcgatgcatcgtttagcgcacggaaatcattcagtcgtttagagag

SEQ ID NO: 27963 - DNA, 917 bp, Arabidopsis thaliana columbia
tgaataatgttaaaattgccataaagagatgaagaagacaagaagattgacatcttacccttcgggacaaggattcttttgaaggcatcttagtgtagatcatggaaccacgccgcttaaacgaactcctttctttatgttcctatatatcgtttcagtgagagaagagagtcaataaatttcgagctaaatatgacatctacagtctttatctttcagaaatttcaaattttaatgtccaaatcaatctgtcaaaaaagtttcaaaattgctgcaaatttctcaaaattaagacaccaattccgtcgaatctatcccagaatctgcaatcccctcgaaacccaaacattattgagctctgataactcgacaaaaacggccaagagagttagaaaggatttaccatgtaatgctcgataaggggaaccatctcgacgagatcttttaagagacgacgatctagattctcattgccggagttcgtaccggcggcagattggtgaggagagagacgaagatcgtcatcgccggcgagccaggagctatcgtccccaaacccagaatcgctttgcaaatccatgaaatgttgctgctgctcatacatcttcttcgtcctccgtataatagatctgcttcagtgattagtcttcaacaccagagagtctgagcagagagagagatagacgaagagaaagacttgatttttattttctttaaaaaaattcgtttcattcttcgttccgagtctgagctttggatctcaatctccaacgttcatctgaaactatccaacttataattaccattttacctcatgttttcactattctcttgacttgccttgctttttgaatttcttccttcttctatgatccttaaatttacattatgctttgtttaaaattggaattgagatt

SEQ ID NO: 27964 - DNA, 1066 bp, Arabidopsis thaliana columbia
atgaactattttagacgggaaatttccaaccatgttctaaatgatcttttcgtaacactcaacttttttttttttttttgaacaactttcgtaacactcaactagaacacaaagtatcctaagcgaaaatagatatgtatagaattggggatgttgatgtagagatatagtcacaatgaaaagtagaaagatacttaaattagtggttaacaaattagctatatatgttgcccaaattccacacgcaacctaacattttttccttctacatggaatggtctaaaactgcatggctttgtatctagttataggtcttaatcatgatgctaattttagaatttagtaggggtagcgtttatctgacatttttcacgaaacagtaagatttgactgatctagtttcaaactggtactaattaatcaaattattggacgtaaatttaaatagtagtgtttggaaaaaaagtaatatcacatggcaaacatagagaaggcatacaaaatgagaagcgaaggcgtcgtcccgtgccccatttcacactctcgccgccgctatcacgtgcctttgcttcgccgctgccacctcaactttcacggctctgtcgctttgattgttggtgaggtcaccacgtgattccaacaactttcaagctacttatattatattctttaattttactcataatataacagataaaattatacaactcaaaattaagtcgaccaatttattaaaaatttactttatcacaaagacaagaacaatctaaaattctatctttttcttttacagaaaacaagataagaatttatcaaatacatcaaccgagtacaaacgattttatcgtcaattactaaaactattttatagattttcatctcttattccgacttttgttgcacaattatctttgatctatgtcgtgttaaattgtatttatcaaacgatgccgttaaagattggttaataaagtttcaaaattaattacattttgaagtaatgttacatagctcaaaactaccaaactagtaattatactttcaaagttacgtataatttgccaaa

SEQ ID NO: 27965 - DNA, 619 bp, Arabidopsis thaliana columbia
cttcctttttgagatttcattattcacgagttgttgcatctgctttgggattcaccctaatctttggtgtgattcgttggtctggcctaagaaagacccatatatacaacggctctctctgttcacttcaaaagcaacgaagaagacgagagagatcacacacacaagcatcacgtcttaatttgtttgcctgcgatgataagatctatcatccaccgtagaaacagagagagagacgattcgaaggacatgttgacgggaattttaggcttcgggagtcatgatgttggaggttctatccggcgattgaggtgtcgatagattgaggaggtggagcgatcagaggattttaggctttgggagtcatgatggtggagcgatcatcggagattggcgatggagattgaggaggtggagcgtattttccgttaacgggtaaagatggcatgtgctctcagaggcccaatagaaacaattccagcccatcaaacaatgactagcccattgccaggttaattctcagcccattttcttgtttaattaaaaattaatatattttataattttgattaaaggggttttcttctcaccgattttttaaagtttttttttgcaattt

SEQ ID NO: 27966 - DNA, 540 bp, Arabidopsis thaliana columbia
tgttgtccttggctccacattacgaccatccttacgcaatcaatattcttatctatatagtttctgttacttagacatcaatcggtctggatatagcaaacaacaacattttaaagaatggcaaagataagacacagaattttgttttatccaaacttttttcatatatctgttttgttttcagtatgacacacacaagctttttcacattgtataccaatcaatcaaactcactctatatcgaacccgattctcagatccataaagaatcaggtctactactcaaattttattccaatggatgcgtagatgtaatgtaacaacaaagaacgaaagaagaaagaattataatgaacgaatagagaatgtgtgtgtgtaagtgagagatgatgcagattaccatctttcaatctagatgactttaactccacttggacgtttccttccatcgcgtcttttttgcacgacaatctgtgcataagaacggtccttgccacggttttagacttgtcgagaagattgaacatgcgtggactgata

SEQ ID NO: 27967 - DNA, 1016 bp, Arabidopsis thaliana columbia
gtagaaagccacaatacaaagcctgtagtcgaccattctcaggacataaaacctggtggcagtttcataaacttcaagttcaaccagtcagttatcttacaggcgttggaatctggtaattcagcttgactggtcagtttgtcacatatcggttggattggtgttgggagtaatgatgcggttggattggtgggtttgtctatagcaaaaccgttggatatgttcatacacgctggtagctttctatttctttgccatttggtttatatacctctcgtttcttctagaatgaaagggttgttgtaaatgatgttagtagggaagtggtgaatcctttggatcatggctttagatgacaatgttacgaccagctataaaggttaaaagagtttcttatccgagtagtgaatcgatgatcttctttatagcgccctctaactgcttaatcgaagcagaaagtgtttttctttttagaataaaaaatgaactcacctataaaacaaaaagtcgcacctaaataagtgaagtttatgtaatactatgattaccttggaaacaagagatatctcgagattgtttagtttttttcacattgtaatttgttagtataaaaggtgggtgggggaatggtggcctaaattcggcaagggtggcctaaaaaatacatttgattgctatacgaaaacattttaaagaaacagaaactgacaagtggcattttgtgttttacacttttacttgcttgtgtttaggtttggaggttcatctacataagcatcagcattgtgactttgactctccccatcaaaattaatcctaaaaatcaaagcatgttaaacagcccaaccacattgagaattttatctataaatagaattagaaattaaatccttggttaaacccataactcttctttcctcttttcttctccggctaacggtagttttgacgccgttagtttttcctccgtctattgattttcccgcttcacaatcgcaacaaacccaaagaagaat

SEQ ID NO: 27968 - DNA, 511 bp, Arabidopsis thaliana columbia
attccaacaaagtttcaaactgtacattcgattctgtacagatatgtctgtacaatggattctgttcagagtatttctgtacaatcgattctgtacagttataaatgtgttcaattagcactgtcggcaaatctttttttgttcccaaatttgtacagatattctgtaaaattattcaaatgtacagtttgtaattagtgtacatcttgttatcgtacataaataaatattgccttccatcctcttaggttcatgatacgagcttggggaatctattgtcttctcttccaaaacctctggccagatgtcttcccacaacttaatccaccattcatgtaaactgtactgtatataagaatagcactgtctggcaaatctttttttgttacccaatttgtacagatattctatacaaatagtcaaatgtacactttgtaattagtgtacatcttgttatcgtacagaaataaatattgccttcatcctcttaggttcatgatacgagcttggg

SEQ ID NO: 27969 - DNA, 759 bp, Arabidopsis thaliana columbia
agtcccacaagcccatttgcacagcacgctcgtctgcaaaaccaaggcttactactacctttatcgttcaatttcttaagttttacacttatactcctttgggctagcttattattctgtaccaaaatttagttactccaatgtgaatttgcctttttgagcattgttaatttgcaaagtaacagaaaaaataaagaaaattgtaatttgctttttgggaatatatatacatcaggcttttgtagacttacaaaagttcttgggaaaaaaatcgacatttaaataaaatgtagtttgtcagttacctgggcgaagttaaaaatattgaaaagatttaggagtcaaagactcggtcagggcccagctctcaatggtagtagtggcatgggtgagataagactctctctctcgctttctcttgttcctcaaaagacgaaagacagaagagagttatatcctctgtatttcgccactaattcttccagctgtgttcttccatgtgtcacgatctaacatcgtcacattttcatacattgatcatcaacggttagtggctcaaaccatactagtagtctcagtaaatccacagtctccacccttaaaataatccttctaataacaaaaacaaagaaagggaatgtcaaaaatatggcagtaattggtttactttttattttacttgtaagttggtagttggtacataatcttgtttgtttggctctgtgccaaaagttatgtttctcgtgagtatttttgggg

SEQ ID NO: 27970 - DNA, 584 bp, Arabidopsis thaliana columbia
caaatatcttttattaactatatgatcaacctatgccacaaacagaacctgattaaatattagtatttgttagtttggcaaaaaaacataaagaattgtttcactataagtagatcaaatatgatgttaagagatcaactcaggcccattttcaaaaaatatggccgaacacatatatgtatgtatcgcaaaagtggtataaaccatttaatactactatacaattaaagacaagtctaccgaaaacaaaaagtttctagctttgtctgcaagtcaaaacctttttctttctcctctccgtcatgcccacaatcgccctcaacggccagcttatcgcgggcctatagcttacactaccgcttcttcttatctctcttctcaccgtcaatataaccctctatcttcttctcccaaacttcatttcatcgcatcttcttcccctcgcttcaaatccttaacttgctcagcaaacttacattatcggaagaagattgagccttcatccaaaaaatttctccttaactcatttgcgaaatcttttatcgtctctgcgtcctccgctaagccgaaagattcgtccaatg

SEQ ID NO: 27971 - DNA, 495 bp, Arabidopsis thaliana columbia
catttataagcagcttcaagaatcttgagattcgtcgtccctgattcttcagggaacagataatcaaagtattcttcatacctgccaatttttttttttcacattgagctttaacattcaaaagataatagtcgagaaattatatgtatgtaatgcctactctgtagagccgtcttctctactggtcatctttctcttcttgagcttcttcgggagctttgattgaacgacactaacatccccgagctcaccaaagcctgtctccatgttaagccaatcctccaaaagcgtacacgctcttcttcaagctccggtgtggtgtctttgtagtatgtattggctctgtcgaagatcactgagtagaagaaagaaaaaaaagcagaacaaaaataaataatataagaaacagataacttgtgtcacaagaaatcatccaaactcttaatataacatgtagcttcaaacctctggcgcttttgatgccgcttctttgtg

SEQ ID NO: 27972 - DNA, 713 bp, Arabidopsis thaliana columbia
taaattccatttctaaaaagattatgagtcttaccgaacattgcacggaagggactccagattatcgtcaagttcccaccttgctgccttagaagaaggtctaacaaccaccgttttgttgcacttaatcgaattgccctgaatataaagtgtttgagcaattacattataactgacagatagaattgtaaggtggaattctgttagtttaaatttatcaaacaatcctttcatatacaaaaaagaagagtgtagaaagttacttacaatggagaaagaaaaattgtaggtgccagctttcttgaaaaggtttggaaacttggacccaagtgagaagatgtaaagaccactaatccctttacgggatgtaggaaacaagcgctgcgaagatatattcttatcacttgatttcaattttactaccatgaccatttcttccccatccatcttaacgatatttttctggtccaacttctttgacggagttaaagacgtgaagcatgcaggtcggacaactgcaacaatctgtttcggaggagctttctccagcacgcacagaattgccaatgggtagttcctgtaacatattgatacataaaacgttacaatcggtgataagcttgtttgaaatacaaaggtgcttagttttgtggcaacgatttggaaacaaaagtgcttattgctcattatatgtatttgcacgcaaaggccgt

SEQ ID NO: 27973 - DNA, 1006 bp, Arabidopsis thaliana columbia
taaaaggtttgtctggtcatacgtttgggcccgagacgtagtgcgcaggagaaggtgaagagacaagctgaattgtatccagtggtcacgccattgatgccgttttacgttcttagtatgagacgttacgtcgttttattgaagtgaaacaccaggaagtctgcatctgacacaaatactaacgcttaaagtaaaaactttcggatcagtgaattatggactttgttggaatgttgggtatatacaaataggaacgttaatgggccagtgaaataaactttaataggccattaattcaacatggtacattagtgggctaatatatattttttgggggtcataaataattagttcaacatggtcataaatatttaaactttttctcattgttttttttttttctcaattgttttttcttccatatttgaaatttcaatgcttttcctcaagttaaatttcatcaatatagaaacatataaatttactattgttatagattttgagatacaaatatttaaaccaattagataaaaaatccatataagattttatcatgaatttcttgaaagatctccaattattaaatgtatattcctagaaaaaactatatacagaataatgactaatttgccacaaaatacaattattcttacatatataaattgcatcaaaagggtgataagttatcaatttcaacactgatttactcttgaaatatctctttctcaatagaacttccaaaggaaatgaagtaagtctctaacattctcactttcttttgcctcatagctctcctatcccgtaagcatttcttatatctctgagattttgttcatttctgtaatctaaaactcaatcaataagacttattactatttaaagcaatattagcatacatgacttaagttagttttaacggtgtagatataacattctcaagtgttagcgtggtggaaggtagaacacgttggagcatgaagccatgtcgcatgtgattaacaaaaga

SEQ ID NO: 27974 - DNA, 472 bp, Arabidopsis thaliana columbia
aatttccgccgccgaatctgcctccaccggccgaaccacatcaatttcagctccggcatccattttccggtgaatgtactcgatgttgcctcagtaatgacagtaagatgtatctgttctccacgttctaccaaactacaaatccaccccactaatattttaacttgtcctaatatgcttacaccttttaaaagttccaatttaataccctttcaagaatcatgcatttgctgttttgctttgatgaagcttcaacaagatttgttaccacattggaggaaaaataccaattcatatggtacacagtggtacaaaatgcgaatcaggatcgtataagacataagtcacctaaactagacattgactcatcatcaaaagtctacgttagaaaattcaatgacgattagtcaaattttgtacagcacaagaggttgaaattgaaacgcctgtataaatattacatcttccaaga

SEQ ID NO: 27975 - DNA, 1520 bp, Arabidopsis thaliana columbia
tccagattcacaccattctgttttgtagacttcattttccttaatttgttttgggaatcatggctgaaaattcatggacgacagaggagaacgagatgttcaaggatgcactggtgatgttcactgcctttttgcttactcggtttgagagtgtcgccgagtatgtggatagatcggtggatgatgttaaggagcattacaaggaattggtcaatgatcttttagagatgggatccagtcgagtagcttttcctaatgaattgactaaggatatggctcaaagttcgtaccaggccgagagaactatatggaccaaagaaacacatgagtaagtatataagattaatgagtgatgagttatgatttttgttagttagtggaatttacatacacgtataagtttcaattataaacataatgattgattagtactggtattggtttgtggatctagctagacgcattctcctcttagactccataattcacatagttcatttctgagattaaaatgtatttagtcctatgatcttacgatttacacattctagcattatttttttaatgtggacaatatagtttttttttttttttcatttgactcaatttatatcgttaactaataatgccatggtgaaacttgattaaaatgggctgatctatgaactggtggaaattgtaatgcagatggtttctgattgggttagaccgatttgggaaagattggcgtaaaatagccgtcttattggattgcaagagcccgatccaagtcgagatatatgcagaaaacttttaccagtggcaaagctcaaagaaaaatgtgattaacgacttaaatgtggcaagcaccgatgtgaatgtgatgaaacggcagggagcaaataacaccaatgtggactcaacaggccaacaagagagtctcgtcgctctggaaatcggtcaccatgctaaggccccaactcaaagtgatataaatctctatgactgtattaacaaccaaaaaataaaaagcctaaagatattgaaggcccttgattattttttttgtgtggtatgttaaagatttgggatttccatttttttggcaaaccatattttatttaattttgtggtcatctatattattttctttaaccattaaaataatatatatttcaatgtgtttattttttgctttatttcatctaggctaaacagaagatacacgtaagatggagctttcaagttaagtacgtagtatatataaagttggggttaaataggaaactaaaataacttgaaattacactccaagttttacccactgcgtacgtctaaacgtaaacgagaagaaaacttctgagtcaagttgtgcgtgtttaaatacgaaatcgtgtttctttttgtaaagtgagggctaattttgtaattttcaccattacttgatcctctataaattgtcaggttgccaaaattaaaacgaacaaacaatcgctcttcagtaacatattcacaaaacgatcttcttgtttcttgaattt

SEQ ID NO: 27976 - DNA, 534 bp, Arabidopsis thaliana columbia
tccgcattttgatttacatttatgaatttccacatttatcatgaggtcggtggaagcggcggcgaacagttattttaaccgccgcaacaagtcttcaattctccttcctctccgccgccaatctgccgacaagtttcttttcgtcttaagaaaatatattgggtctcgtttcgtacaacaaagtgtagtgtttgggctttactcagaagcccataagtattttattattatttttagacagtaaggcccaatagtattttattgttactgtctgcgctgaaacaatttatgtttttcagcaaagtaatatcttactaatcagtaattacatacaccgtaacaccatcacgaattttcagtacacgacagagtataggtatgattgactgacaacaatataaaaaggctaaattagttagactgtcttattaattaaaaagtaatattgtactattactatactacttcacttaaatatttattcgacacacaaaaataaaccattcgtgtgactgtttccaaacacatttgggg

SEQ ID NO: 27977 - DNA, 514 bp, Arabidopsis thaliana columbia
gaagtcttagtttgtcttacagccttgaaatcacttgaacaacaaagattagatgaaacaactacttacaatcactgtttcagtagtcgttgacaccaggaacttaagcatgccatatttacaacatgctgtctagatacgttagagtagaaatcgtcgtagcggattactggacatcgattaacacatccgttgagaaggtgatcgatcactgggtcatcggatgctagtgcgctaaggagtgctaaggatggtcatctgtagggtacattcgcgaaagctaggtgagctgaacaaagtgtggggcactgcagatgctgtgtgtgttgcagagtggagattgttgagtctgcaagcatctaaggcatagtcgaaccaggaaaaaattgaaaaatttcagaaaatgatttcacaaaaaaaaaagagtgttcatgtagtttcattacatttaggatcgaatctagagtgtttcatttaggattgttgcatatgcataggggatgatgatgagata

SEQ ID NO: 27978 - DNA, 380 bp, Arabidopsis thaliana columbia
tgtccattatatatatatatatataaacaaaaatcaatcttttgaaaaatacaaaacgacttacatgatgcttaaggctagagataaaccctgtgaagttgctgcaatagaaactggaatgcatctttctacgaataagctctttctaattcttatgccaatatatacaatggaatgtgacacgtttagacacttttaaataattttattccttttgaggcacttatgagggagagggcactttttctattatttgatttctttaaagacatttttacccttaaacttttcttttgaaatttaacacaaattaaatattttctctctccacgatccttacgtaaataaaaaatcaatctctctctctctctctctctctc

SEQ ID NO: 27979 - DNA, 561 bp, Arabidopsis thaliana columbia
tcacacagaaccctggccttaatttctaatacaatgcttgttggatacgtaatctatattttctttacttcactttcagtcacaattgatggatggttgaagcaagcagcaccagctcaaaccgcggttctgttcaaagagctccggttaatcctgcattctgttctcaaagatctcatccgagaacccgaggttgcatgttcagtcctttgatggatccacttgatgaagtagctcatgcctaaatccactcttcacgcttgtttgtttgttttttccccccagaaagtaggtaatgtccacaacgaagtcgtcaaagctatgatttatcttcttagtgaagaaggcaaaccgcaacactcatgagcttgtcccatgaaatgaagatcgaatcgtgagaaaatttcaccaaaatttgcgggattggacatgtgtaaaaagatgccatttggatactgcttgattaattaagttagaataactcttacaaaaagatcaaaggaatcaccgttgttgttttttttgtgtgaaatagatgaggtttttatataccaattatga

SEQ ID NO: 27980 - DNA, 522 bp, Arabidopsis thaliana columbia
tctagaggatccctgaacagaactcttacccaaaaacttacgagatttttgattataaacggtggtggtgattgagctcttgtaacgatttcaatgacattaagatccaagggcggtgactcatgactcatgtctagtggtgaaacgagatggatgaaaaagacggcaatatctcggcttccgattaccattcatggtgagtagtttcagcgataatggtgacttgagcaacaatgaaaagcaaaagtggtagtttggatctttatatgcagttttgatgaagatgatttaggatttattcgattttgatgataattgaagaggttgattcaattgaatttctaaacatgtaattgatttaatgtgtctaaaattggaatccttgggtttcctacacatcatccccttagggtttagatttcttttatcaaaaaccagttaattggatcgataggattcaaaaggtagaagaagatcaataaattttttgaaaaaaaaacagatgaacgaagacaagatgtg

SEQ ID NO: 27981 - DNA, 593 bp, Arabidopsis thaliana columbia
ttctataccttttgaacccaataaatccaattacatgcattttgttaaaagaaatctaaaccctaataggatgatatatatagggaacccaaatgtttcaatcttatacacatattaaatcagttacttatttgagaattcaattgaatcaacctcttcaattacatgtttaacaagaaacccaaacaaagaaaatcgaagattctaatagaatctacaaacatgttgatgtgtaattttagatggataatttaattgtttccttaattgaattctgtaaaagattgtgtagaagaagaagacgacatagacaagaaaaacaaatattaattgctaataatacgaagggtgaaatcgtcaatacaacagagaaagaagtacctaattgcatagacacatgattttgtgcctatatcaacgatgacatgacttttaagtgctttattcataattgatccataaaaagaacccaagcaacaaagtttgtgaattttgtgaatgaatggttctattttttggataatgaaaattagtagaagatgagttttggaagacacagagacgctgctctcacgtcgagatgttgttggctg

SEQ ID NO: 27982 - DNA, 713 bp, Arabidopsis thaliana columbia
gtggtgttgatacatgtataggttgtgaagcttcttagagaagcatatgagagagtgaaatctctcttgaaacgggtttgtgccaagtttacagatagtcgcattttttactggatcaaaattgtttaatctcacttcgattttgtgtgtgtgtgtgtgtgtgtgtgtgtgtgtgtttccccagcatgagaagcagctacacacgttagcaaacgcacttctagagtatgaaacgctaaccgcagaggacataaagcgtattctccttccaaagcaggaaggcgagaaatttgaagagcaacaacaagaagaaggagacttggtattggcctaatcacatcattcattaccataaacacacttctttgggtgaaaaagggagattcaaagctttgtacagagtaaatctcccatagcttctacaacaacaaccaaaagaaaaacatatgaaattattgatctcatgttacaaaattattgtagtttttatttcattagctcattagttttcgcttcgaccttgaaccttttgccctttttgacattctgttcaattctatgaagaaaaatgtaaaacaacattgaaaagaaagtaataattgttgtctttattctctgatgtgattttgaaaccaatgaatcttattgcagcttacaaggtcctctgatgaaattacatgtattgtttggacaaaattgaaagacacatatag

SEQ ID NO: 27983 - DNA, 748 bp, Arabidopsis thaliana columbia
tgagtctaggttggattactattacctgttctttgcggtacttaatctggttaacttcgttttgttcttggtcgtggttaagttttatgtttatagagctgaggttactgattcggttgatgtgaaagaggtggaaatgaaagagactgaataacaaataatgaataatatagatttctctatatcagtaacttttattcatggactttgttaagtaatttatatcttccacaactaggatggaattgttagcagaacatccgaagctgagaattgttggtaattaactcacagtaatgtctagataattaatatagatgagcttgcagataattcgacatggcagcaaccaaacttgttttgcaacacgttgatccaccataaaccgatccaattggacccatactagagataacctttcttccacgcttgccccaaatccttgcaacacgttgatccaccacaaaccgatccaagtcaaacccggatccaagtctgtttgaattaagcaaatgggttggcttttttacacaaacaaaaaggtaaaaaaaggagtcgtttaagcttatcctttttttctttctaattgattcgatttcattagaacggataatttttaaatagattaccaacaacaagtcaaacaacacatgtcgtccaatgttttgttggtaggcacacatgtcgcccaatattaaaaaagattaagaaattcctttccattttatttgaaaattttaccaaaaaa

SEQ ID NO: 27984 - DNA, 1293 bp, Arabidopsis thaliana columbia
ccaatccccgctgatcctaattaacgtctgagaagagtgtctcacgaaactgcgaataactcaaccaattttaattcaaatcaagttctgttaattggagcataacgataaacaacttgggaataactctaccaaatttcgttacctttgaccacgatttgatatgacgaaactgatttctcccaaacccctaacgattctggttccttctccttctctctctttttctcctttataaaacgaaacgtggctaactaaagccctaattttgagtttccttcttttatacgcacactctagggtttccaattaacccaaccaattaaaccggattatttaacaacaaacactatccgattttctggttcacgggcgttacagaagtgaagagggactaaggtgtgtttggtccatgaagcattaaagtttggaaggacatgatttgatagtgttgttcctaatcgaatcaatttgaatcaagttccagaatatataagttgagttctttcagtttgggaagtgtgaaggtgaagaggatttaaacaataacatcaaaggagagacagtgatagagtattttttttcttgtcaaaccttgttttcattcattcaaatagaaacaagtacaaagaaaagagtttaaaaaactcaaaaattacaacaagacaacaagaggcattccccaataccaaagaaagatagatagtgttcaacgatttaaaatccatgaaagcattgaggcaagggcaaagtagcgcattgcaacatgagaggtcacggtaaatcgagagatcatcctcgaagggttcgaagaacgacagattagtcacggtcgaaagacatagtgacgttgacaaacgaatcaatgatatgattctcgccggagcaagctgcattacccacagtaacacgataccaatgattcgggagactatggtgctatagtcaggtgagggtggttttaaaatccaaagcaaatgcgggtctctccggtcaaatgcggcaaagacggtgaggcaattggtctagaagatggagatgataatgagggttcgatgcttgaagacgatatatgatctgcttagtggcaaatgagcattgaaaaaagataatgcaataccacaaaagacacatcaacaagaacgattcaattgaaatagcgcaacgatcttcaaatctctacaaagataccacaaagccctaaaggtagctaaaaccaaggttcgcataagataaatggtaagccaaaccgtcaatgttgatacctctttcacatggagtccatgaccatag

SEQ ID NO: 27985 - DNA, 813 bp, Arabidopsis thaliana columbia
tatttttgcaatttgttaatgcaaatactaaatacagacgatgacgcaaacaaacgaagccgtagtcggaactaaaagccaaaggtggaaaatgttagaaagtttgagcgataaactcagagattgcgtgtgaagatgaaacaaacctttcacgaccttaaccaaatatgattaatctcaagaccaaacataaagtatggttatattaatattataaatcagaagaagcatcactaattgcttccatcttaagtcaaatttatcaatcgtgcaaactcatttactgttttcatcgcactcaccgacagaaattgcaacttcaccacatcaaaaaatttcaaaactgaatataaatcattattaattcagtaagtaactaactataggagaggattatgaatcttatgcataaacataataattacaaaaatacacatgcttcagacaaaaaagcaacataacacatgcttcatgtcatcacaaatcagtcaaggacaaaccaccttctttcttttcctgaaaaaatttctgaattctgaatatcgaaaatgttatcactagaaataaatcagtcgatgtggtttacattaaaatacagaggccgatagtaattctccagggaattatgcttaaaacaaatgttcaatagaaaagaaaaaaagaagtgatttttagcctctcattgtgtgaaggaagaaacaaaaactgttaaaaagaaaccacatcgaggtttagagtcagagtagttctaagacttacgtggccttcctcttcttccaccggtcttcacgggtggagcctttccgttactgg

SEQ ID NO: 27986 - DNA, 701 bp, Arabidopsis thaliana columbia
cgatcccctttgccaaaaacaattagacaccacaatttctagaaaattagatgatgaactaaggaaaagtatagaaaaactcacttcgacaagtgctaactgaaccttgagtagtcttattctaagaggagacaagattgagctacgcaagataaagccagtatctcctcttctcaaattatccccgagttgagccacttgctcagcaaaacacaactcaccaacatctggaccagcatgcatctgaccgcaactaggacagcaaatatctccgacaaagtgtagttccgcacagattctgcatatgcgaaaaagcggactgctttgcttagcaccatacttaaatgcagataaagcactaggatgcagcatattatcccacatccacttctcgaaactatggaagcgttgcaatacgctgcatctctcaacggcgttactatcccctagctcgatcttaaacgtcgtggagatttccgcagtatcggaatccaagctagaagatatggaacacaccccgggatttgctgccacattcctccttaatgcttccttgaaggatgcttcgatcttcagcaacataaagtgtaaatgtgattctcttacaccgcgaacatctagtgacttcaccaaatagtcaaaagcctgaaaaaaacaagtagcaaagaaggttcgatgattgttataacacaaatgtttgc

SEQ ID NO: 27987 - DNA, 542 bp, Arabidopsis thaliana columbia
cccatcgttcttcccgctcgttcggttcattcaatttgtttcgaaaaccttttaacccggttcgcggttattttattttaatcctcaaccacgttcgaatctattagcgacacagtaaaaacaaatatattttattaatcaaaaattcaaaatctgaaaaaaagacgctttcaccaaaaaaaaatatctccaatcgatttctctctatctctctcttcaccaccgtcgcgtgaagaagacgaaacaatcgctctctccttgtgtggtctcactatctttttctcaccttcgcgtagttaaccatggaaaagtagagaagaagaagaaagagagaagtgagagaaagacgaagaagatgaagagcatattgctttttctgtccccagccatgtgagtttccactgacacattctctccatcttcacatttggtgtttttttcttttgcttgattctttctatcttcattttcagatttttaccgagtccgtaaccgagtttgaacgagttagtggatggcttcatcgtcgtctagaactagga

SEQ ID NO: 27988 - DNA, 583 bp, Arabidopsis thaliana columbia
ggattttatgtaatatttgaacctaattagacatgtattttcctattttaaattaggtgtattgaacggccaactgggacaacttagctagtattatattttaaattatgtgtattgaccggccaactgggacaacttagcccagtattgtattttaaattatgtgtattgaccggccaactggaacaacttagcccagtattgtattttaaattatgtatattgaccggccgcgaaattcggttttgatgattttggaatcgccggagacggaacaaacaaagtggatgtcaacagttttgatttggtaaaattttacttaggttaaaagttttcaagaaattgtttggtgaagaagcaaagatgaaactggtgacggtgaactgatcgcggaaagaagcgacggaaattttcgagaatcgccggaaaaatcgccgtttaggttaatcggagaagaaagcgacaattttgattttttttaaaaattatttaggttagaagaaaacgatttgggggaaacccaatgacaatggatcggatctgtggatatgtggttgggtcatgtaattttcttaaaatacca

SEQ ID NO: 27989 - DNA, 575 bp, Arabidopsis thaliana columbia
  unsure (1)..(575): unsure at all n locations
gttacttcgccgtttgcaagatatgacccaaagagtgtagacatgtcaagaaccggtcgtttggaaataataaatccaaaaagcatccggccaaggagacttgaacccgggcagctccgagaagctttccaccgaccattaggtcaagcccaagtcaattcctcattgtgccaccgtcatttggctccttccctgatgcccacgactggccctatcacttacttatccggcggattgacgtttttacctctaaacctaattcttggccctcaagtacaaatacttgttataagccctaaccctaggtgtgccttcatcaaaagcaaaccctagccgtcgccgagagctgccgactcgccgccgcaactcttgagctcgaagatcaccatctatctctctttctcttttgttttgtataagactctttaaggtggagctttgctcttgtgtcttcatttaaagaagtatctctanaccctttttaagttttatttgtctttttgttttggtttatcaaccaacttttaattagtcctttgccatgagcgagtagactctagttaggtttagggggt

SEQ ID NO: 27990 - DNA, 605 bp, Arabidopsis thaliana columbia
ccattgattatttttttcttttttcaaagatagttctaaaaaaagttttattttattttattttattttttgttcagattttcaacgttaatggtggggcaaacggttatatcggttggtgacggtcttgtttctctgacgataatgaggtgcggttgttccgccttctaatgcgagttgtggtgaacttcccgacgactttacgcatccttctagtcgtaccactgatttaaagacaccaaaagagggactaaagaaagttgtcagctcacttgtcggaagggctgttgcaactggcggcggaagtcaaagacggagttggtggggttcactactgagtcgagacgattagctgccagatttgtcggatctgaggtggctaggtgtgcagaggcggttaggattttatttgagtcaaccgctctaatcattgttttcgtgtgaccggatttgaggttgtggcggtcatagaggaaacttgtgctggtttcggcgatggaggtgagagttcgatttaggttttcggttacttgggtggggactggttaactgggtctattgtttattgtgagaaatttcaggtcggctctgatgttggcttcggg

SEQ ID NO: 27991 - DNA, 1023 bp, Arabidopsis thaliana columbia
acctcacatgaattactctagctctcatcagaccatcattcattgtccatctcggttgtgtttcttttcattagctgttttaacttttaatttttttttggtgatgcagcaagggctctttgcaaaattattggagaaacattgttttacgtattctataggtatatgtctttggaattgaaagtacttgttgattcactctcttgtcaaaggaaccataacaatttttgtcgtgcagcatgccgaaagatgaggcgcaactctatgcggctaatgaactgtaagtccttttcatcataatatatttttgtttctctagtattgtaaatatgaaaatgcttcttcggagttttttgttcacagttgtcatatattaaacttggaatatagattgaagatgaatttgtcttcacatttgaaaaagaaagggaatatgaaagcaaaacatcaacttttgattccatctttcttctccatgacttgaaaatgggtttctgtcttaatttcctggtttggtatcagattgcaatgcactgaaggataaagctgcataactcttattgttttgcagttacaataggggttggttctaccacaaagaacacaggttgtggttcattagaatcggggaacctctcgtgaaaacaaatgcgtatgaaagaggatcatatcactgttttgatccaaactcatttgagatcgttcaaaaggtgagtacatccaaattctgctcatcgtatctttcttcatttggcctctgaagaataccccaaaatcatttctttgcaggaaaattttgttctctattacgagatgctggaaaaaagaccatccatttctcaagattctcaacattgagtgtaaactatgccttcttcagtatttataatgtaactttcctaccaaagtatccattggttaggaaattcatagaacaggaaccagtatccaacatgtatttttctcggaatttagctttttggtttatttaactcctggtaacttttgttgttgatcatatat

SEQ ID NO: 27992 - DNA, 589 bp, Arabidopsis thaliana columbia
aacccacaaacccagattttgaatacattattaattgttgacaaacaaaataaaagaatacattattaatttagcttgttacttttggtcccatgcaagattaatgtgaccatataacccatttttacgacaaaatttaacgatataatatatatgaccataaataacttctgaagtaattaacaaaagaaaacataaataaaatgaattaaaaaaatggaatatacgaggtccatgttaatatgttataaacacgtttacaaaaaaaaaaaaaaaacgtaatgcaagaataaatgaaggctgcaggaagaaaaataaagggctttcgtgcagaagaaagaaacgtacgataacataactgatatctcccgtaagcattgtcttacgtttattaatggtctggcgactatataatttccattaattcaacatctaattacagtatttgtccgtccacgatatgcatgtattgatatttgatatcgtaaaaccagaattcttttttttttgttttttttttgaataacaggaggttctgggtcgaagcccgtaattcctcagacccgaaaccacatcatgtaatattagt

SEQ ID NO: 27993 - DNA, 546 bp, Arabidopsis thaliana columbia
ggtctaatggtaaaagtgaaagtatttttactagttcttgctaaaataagagggtaatatggtccattggtcctcatctggtctagtgttaaatctctaggaatttcctgattttctgatcactttttagctggaactcagaccatctattagaaaaatgtcaatggtgcatgttctgagaatcaaacacgggaccactagcacccaaagcgagaatcataccaaatgccctgtacgttgttcgattaacgcctcctattagcattttctcttttcttatagaaatttgttgctccgtttgctattctggttgaatcttaattgaaattctttttctatatccgcatctcattcttggtgaatctggctgatagtccttcatgtatgaaggttactggttacaaagatttaatgattgtacagtgaagagtggtatgttcttcttttcgtctgcattaagctccttatattttatcttgctgaaatgaaagggtattctatagttcttactttggtttagtactaaataaagatctgattttaagc

SEQ ID NO: 27994 - DNA, 952 bp, Arabidopsis thaliana columbia
attcaacaatgcgaggtctttgcgatggatttgcaaggctatcgtagcacttccctcgcaaatatttaccctaaaccttaaattattaaaaatatttagtcatgtttttatttgctgagagtcttattcgaaaaaggagaatctaaatcagatatgattcaaacagtgaatcaaaatggtggagttaattggttgaaggattgggagggaattgctagacgcactcgcacttctctcgcaaatattaccctaaaccctaaattatttaaaatcaaaggttacgattgacttgctaggacatctcgcagttccctcgcagtatgtggtgcgttttaattggtttaaaagatcttcctcgcaatttcatagcaaactatacgagggttttgcgaggaaatatatatctatatatactcgaatcaaacacttcttcgtggaatatattacttttttactaagtaaactcttgtatatatatgttcctttgattcattgtcaaaatgtaagagaagaataaagcaataatagaactcttgtttggtctttactctctctagtctttattcttctttttagttaaatattttataacaagagttgaattaatcaatggtaaggttgtaaaatattacaaggaataccaagtgatcttaaaccgttgaaataactcttctcaatctcaaggatcatttatctcccaagatataattactaccactggttcataaaatctaatttgatcgtatatcaaactttcaatacttaaaacatttcagaaactataccttatattgaaaacaaacaaatatctttgtatactccattccatcacaaacgtatatattttacatatgacaaatgaatcaccatatatagatgatgatatttattgaacagaaaattctgaaatagatacatatgtcctctatggacaatttcaattgtgtatata

SEQ ID NO: 27995 - DNA, 608 bp, Arabidopsis thaliana columbia
ctgttgtgaatcaaaccgaaaatgtgaaacattgttggctgttgtgttgctagtgttttcgggttaggcatttagtcaagttcagttctagactcatcagtttttgttctatatgcctgttttattgttgtttgatgctctgttgtgaatcggtcaaacatagttgactgttgtttgacctggtttttggcttagacctttagtcaagttcagttctatagaagtgttatgttgttctatatgcttgttttattgtgaatgatgatgctctgttgtgaatcggtcaaacatagttgactgttgtgttgtgattgtttttggcttagtcattagtttagttcagttctatactcgtgttatgttgttctatattccacaaatgatgatgctttgattgtgaatgatgctctattgttgagacagtactattgtggaacatagtttatagtcgtgtgtgctcttatgtagctcttgtgtagttcttttgtggaacataactttgttcacttttgtaacatgtttacttctttctttgttgcatgtgattggaggttactcgcgacagaggatctcgcttggttaggaagatcctagaatttttttcaaaa

SEQ ID NO: 27996 - DNA, 874 bp, Arabidopsis thaliana columbia
attttctggtaaatttacataatgatcagttgaaaattgatttcagactttctccatccaaaagatgtttgatgaaatgtctgaaccaactaatttcagagatttgtagattctagcccaaggaattggatgattagactgcttattgactttaatagattggtgtttaaagcctgctttattatgtttcatcaacggaagttgagattaggaagttctagagttatgagaatcactcacacggaagtggcttgatttggttttgaatctattgtctagggatagcttgattgagtttgttagttagctaatggattgaggagtccactaagaccaattaccccattcttaagagctctgtgtcgtttatttgtgcaaaactcgtgtttttagtactttgttcgtttcgtgcaaaattggtgtttttagtattgtactcgacctgtttactcgtttgctcgaccgagtgctttacctagtgcttggtttactttctgttcttgttatttgatttgcatgttaacctgttgcttaggtttagtagaaacacaccaaacctattcacacttggcttgacttagtattctctgatcatatcctgattgatagcaattacacccatttggattgacaccttaaatgctgcaatgacataagatgcatttagggaattgacacacaaaacctatgtatcaatttggcgccgttgccatttgggtgtttttcttgttacatttaggatttctgagttattaagatcaagttctgtttctttctttctttctggttactcacttgtttcttcatttgcttgtttctgtcttgcaggtactcttactcgactagcacgtcgagtacatcaaccgagtaggat

SEQ ID NO: 27997 - DNA, 789 bp, Arabidopsis thaliana columbia
taagctaaagattcataatacccaaagtacccctattgaaaagtcaaaccttgtagcaagcccaaaggcccactttatttgagcccagttatcctcttttggacacatttttggtatattcgagtcacgatactcgaatggtatttccgttataatttacgaaaaccatgtctcttcttttctctacaaccacacgatttcgatgttaattaccaaaaaagtgtgtttaatttagctaaactaattgttttcgttgattaggcccagttgggttgaagaaaatctccaatctttcttcgccaagtctcccacaacactttgtgttctaatctctctgtatgtcgcaaagtagcagcaacttaattctctcatggagtctcttacatcaaatccttccttcgcttgtttctctaaaaccatttctcattacccttctcgtttctccttcgtaaagctaacctctatccaaaagttggaagcttccaacaacaccttatcgttattctgctgtacatcatcttcgaatcctaaaccagattgcaatcgtcgtatcaatttaaacgcatcatgtgtattgcgtccaatcattcgaactataaagggtgtggcttcttctcaatccaggcaatggatgtctcgtttacgaccattacagagacgacacggcggcgttttctgaggatttcgctggagatttgaagcataacgctggattagggattgctccttagagcgctactgcttctgctaagataaagattagccctttagttgcgacgctctctgcga

SEQ ID NO: 27998 - DNA, 774 bp, Arabidopsis thaliana columbia
  unsure (1)..(774): unsure at all n locations
tagtaaaaaactttgacatttcaacttcgcaaaaaaaaaagaatttgaacatatttatatataggcgaattgcgtatacattaacctgttttcctgtcttgccttctttgcagtaaactgtatccaagtggttttgaatcttctgtaatggtatccaatgattataacacaaacactctagtcgtcccagtcatgatcccagccatctcggtttggagccctcgctgttaagccattggcagatatgctaacactctttgctgcactacccggcgatttcacagcattattctcatcccaatcatcatcccaaccctcgtcccagtctgctgtctccacatcatggacccctgactcgttttccaagcctggtcctccactcaattctagctcacggtaaggcactccactgcctgcacggcgattcttccggcaaagacagaatgcccaaattcccccaaaaataatgacggatactattaagaaataagcgccgttaatgggcgtcactagtttttcatatgagggaaagtggaatggtaaggtgctttcttctgatgggtacatgtgaagcgcacactgtccttttccagtatctagtatgatcttgtttgtaccccactaatggatatgttaccatgccaagtgaagatcgattcagtttagtaccttggaataactagagtanagtttgcgttgtatcattanaaatcacaaaaagaaaatcagacttttatatatatatatatatatatatatatgtatatatatatg

SEQ ID NO: 27999 - DNA, 553 bp, Arabidopsis thaliana columbia
acggccgccagtgtgctctaaagctttagagttgtcgatgatggaagccgcttgtcaggtgtggagaaatggtggggtcaaggtttcgtaccggttttggagctgaccatgaccccccaccacttcacacttcacacttcattactaacctcaagttttgaccaccatgacagcggctgcatcatgcagtagccttccgcgagcatgagccaagctgactgcgagcactgcccttgcacctgacatacgatgactacatagtattctgttagccgcagccaatcacgccatcatcgtctcttagaggtcctcttcgagtggcgatatcacgggctgagcaatgaggggcagaatttgtaccagaaaccaatccgtagctctccattacgagcgatcctctcacttgagaatccaagaggcccagggacagcgccaccaagacagcttctgcccctcatctttgcgccgactggtctggacctggtttcagggtggcagggatcatatcaggggcacaccattcggagcgttctcagaaaaaggaccaaaagaa

SEQ ID NO: 28000 - DNA, 488 bp, Arabidopsis thaliana columbia
tttttgctgattttaagaatgggagatcgaattacctcaaaatcacggagaacgatggaaccctaatcctaaaatttgaagttttgtatgatcgaattctctcggaagtagcacgagaaagaagagggaagagcctgacgatgcttggcctttggattttttattttcttctttcgcatttatttttttctctcattattaaataaaataaataaaataataagtgtaactgagttctattggttatccccaaattagaaacgtaaggcaaaatttgtttttttttcttcttttatagaagaaaaaattgggtgaaaaacacacaacacgaagaacacgaaattggttgaagtctaaacaaaatatacaaaaacaaaaacacgaaattggttttatagttatagtctttccgtttccgaagatgaaaccgcgcgatttctaagactacgacacgatacctttttttttttgttggtaacaaaaacaac

SEQ ID NO: 28001 - DNA, 466 bp, Arabidopsis thaliana columbia
ttcctatcaaccaacaaaatccaaagaagaacaaactggtggatttctcgtaaataaaatatcgtggttaaacaaacacacatacattgtatcaactgaagatctcagtaaaaaaatcatctaatcatatccttgacagtgttctatatcgctaatggaaggttccaatacacataagaaccctaatttcatctcatagattaagtttggtgattcgcgaaaggaaggaatgattgattacaaaagaagatataccttgaatttagattgtttcagtatcggagcaccaccagtagctcgcagatgaacaacaactgcgacgaaattaaggaaaagaaaaccatagacacgatcagattagactcgtacaagagagaaatcatcaaaaattctcatcagatttaaaaccatcttaagtgaataacaggttgatcgaggttatggtatagtaatcacatgcaagaga

SEQ ID NO: 28002 - DNA, 784 bp, Arabidopsis thaliana
cattcacatctatactaaagtgaaacattcatgacggtaaacttctcttggagctgtatcttgcatattaagaatcaaagaatatcagtgaattatgatcttcattgtcagctttgtcttttcaagagttctgatcttcagctttgagtaatttccgttttcaattccaataaaatatgttttatgaaaaaatcaatgttattcatcgaccaaaacgacgtaggatagagaaagaaaaatgggaacaacatccgagtagcctccgagaccacaaacatcctccaataagccaaaagaagacgagagaaggagaagagtcgaaatcgccattgaaatggctctcaaagcttcacctgttaccggattattccctcctctccgtcctactgcttcttcttccccttcgacttcttctaatcgcccttgttccctcaggattctccctctcagaacatctttcttcggtaactcaagtgcgtctccttcttctctacttcgctttagggtttggctttatcttcatttcactagcttgcgccttgtttggattgcttggaggaaaatagtgcagctatttgctcaaattgggtaacgtgattagtcagagagagaattgaagtaaaattgggtattgattgtgctttttagtgtatgatttgtcgattttgtgtttcttgatttagtataaatgaggttactcttagtcagtgtctataacttcagtatgctttgactgtttcacatgtctaacatttagttctcttgctttttagttatgttgttg

SEQ ID NO: 28003 - DNA, 489 bp, Arabidopsis thaliana columbia
cctcgaagggcctggtctctgcgctagtcatgtcacgaggagcagatgatgcatatacttgatcagtttcactagctattattcgcctaactgaaggatcaactatcactgcagcattcacaagctgaaaagtacattagaaatgtggtaaattgagatcattttctatgtaatgaaacgatggtaaatctttctaccaagagaacaaggattgaggcgctaaaaaaagcaaatggtacatgaaaaatgaatggtctgttgtctaaaacttgatatcgacgttatgtagatcaatggaaaatacttactggtgtatgaccagatactgccatatcaataacaactctcatgaacttgcagattgattgtgtttctcctcgctgaaccaccgatgccatctatattgctatcattgccaaatgcaaaaagtaaaaaatcattgactgttgcactataaacaaagacatatattgctattacaatgcagat

SEQ ID NO: 28004 - DNA, 573 bp, Arabidopsis thaliana columbia
cataaagctattagattgcataactcgtctattaattcctaatatggtatcacataatttatgtaagaaccactatagtgtaccaatcaaagattatttacataaagaaaaaaaagttgtaggttcattaaatataaccattccgagtcaacttcaaggtattgaagaagacgagtggttggttcattaaacgtatagacttttacacatttcgttgttctccgaacggacgaacagcatgcactgtaatatttgggttgattttgcttattctagttatccaaatattgtggacgtaacttctctgttctagatgttgcttattctagtttccaaagacccgaaacttctagagtttatcaccagaaaagaaaataaaatctattctaaataaattgaaacgtgattaagagcaagtttatttaggtttccatttatgacatataaaaaaccttgctatgaaaaaaaatatatgtacctgtttagggtaaggaggcgggtgacaaattcaatcaattgatggttcttgataaggacaaggccaatggtgcggcctaggtgctcataccagct

SEQ ID NO: 28005 - DNA, 388 bp, Arabidopsis thaliana columbia
cagttttgtggctgggaagtcactctggtgctgtgatcagcgattctcgtcaatgtcgtgagtggcttctccttttcttatctgctttagtttcttggttttaaatcataggagatgcatgagttttttttggttttgttgtattcgtctggagattttctcttgttattttgggttgtgaagttgtgttctatgcgaaacgagtcaagcgtttcatatctattcgttttgtggctcatgcaatgaggatttgccggatttgctagatcgacagtgtgcttagtcaataataaagccattgatatttgccttctcgccaacccaaatctagttatcgcttatggtgctccctatagtttcgatgccacaggcttagcttgaaagtggt

SEQ ID NO: 28006 - DNA, 418 bp, Arabidopsis thaliana columbia
agaggatcccccaatagcttcttatatccaccaattgcattgtcattagtatgtattttattttattttattttgaatttattgtcattagtattttaaatagatctacgaagaagttagaagtaaattcacaaaataatatagcagaaaaggtttgatttagtagtgatcaattccaacagtttaacttttacctaaaagagatattacagccagcttgcagcaatgcaatcacgcaaattctaaattttggagagaataaacaaagtgttacgagaaggaacatgcattatataatattgacacaaaatgacagtttagattgatgaatctttcatcttctgtctttacaacaattttttattgatgaatatttcggaaacatagaatgtcgcttcattgctccctttcaagagat

SEQ ID NO: 28007 - DNA, 478 bp, Arabidopsis thaliana columbia
gagccgggttgagctgaccctcgggtcgtggctgagcggcttggaccgtgctagtcgaatgatgcactcccgaggcctcttgaaacccgcctcgggatgattttccaggttgccatccgaggcacttcgagaccgggtcggggaacccttttgtggtgatgctccgaggcattctcgatgtcgcctcaggattgttcctcgatgtgatctctgaggtgttttgaggcccggttcggggatggttctttgacatgatctccgaggcagtgatcatggttggctcggttacctgggtggaatccaacaggatttatggtgtagagtttatgtttagtgtttaagagcaaatatactataatattttaagaagcaaaaagaatcttggttagcgtttctaagtgaaatataacctgatgtcatgtgtatgattgaatagaaaagtagaaccccatctagatctcgaaaagtacagtagtgc

SEQ ID NO: 28008 - DNA, 575 bp, Arabidopsis thaliana columbia
attaacaaggactatataaatgctaaacacacttcctctggaaaggataaaggcttatttcttgaataataaatatttttgtggaccttactgaaattttcatataactaacttcatagtaaaaggtgtggacagattccaaatgatggccagaaacaatccaagtataaatcattatgctaataattaagggttttctttttgtcaactctttttattataaagggatcggaacagattcattaaaatgtacacattctcaacatagagacatatatctacgagtggtagaaacttaacaactatgttaaaaacatcctacgaaattctgtagtaatctggtttcgttgtttggaaagaaaaaaaaaatcgttttataaaattaattaaatgaaaataaacactataatacgagatattttagtcgttagatatggttgtactacgtggacctagcttagacctcagagaaactagctacttgtaaggtgctttcggcatatgtgactcgatgcaatagttgtagcatgcatggtcgagatagcttatgtggtgcgtcacatcttttgagataa

SEQ ID NO: 28009 - DNA, 332 bp, Arabidopsis thaliana columbia
gatttacgacggatacacgcaacttcctcgcaagcgtgtaaccttacagcttggcgtgggatttactacggccccacgcaagtccctcgcaatttgcgggggatttactagggacctcgcaacctcctcgcaaacttatctgaaaaccctaatcgaatctctgtgtaaccctaaaactttgcgaggaatttactacggtccctcgcaagtccctcgcaaaattgaagcgattttattggttatttagttggttcctcgcaaagccctagcaactttgcgagggatttgcgaggcgatttaagtttatatataaaatgcgagcgagtttgagc

SEQ ID NO: 28010 - DNA, 681 bp, Arabidopsis thaliana columbia
tgactttctctgacaatctgcacagattctttacatgtaactttcaattaaatttgtctcccaattttattcatcataatatttctgttgtatctatatcttgtccccgatctaattctattactcattcgatatgaacttgtccccgatataacatattattaaaatatgttaacgtgtaggtgaagacaataacgctcaactaacctgtggaccaaaatagatggcgaaaatctaaataaaattcaaaattcttaaatgagaacaattgcatataagatgtaggattcataataatagagcaagatgatggaatcgaggacaaaacgtagatgcaacagagaatttctattcggggataagatctggagactaaaacaaaagtattgcttcaattgttctccgctaacaggtaatcatgtcccctaatgcattatatattacgttgtccttcgctatcaggtaatcatgtctctaaatgtattatatattacgttttcccccgtagaattttgaataatcaatttgtttaaacaagtcattttaaaatacccaataacaacagtagaagccagttgttctccactattctgtcctctaatcccttatgcttccacatgattttttgtcctgtatcatcacatcagccaaaaactgttatgtcacatcttcgtcagagcg

SEQ ID NO: 28011 - DNA, 859 bp, Arabidopsis thaliana columbia
cgaggtcttgaggatgggggggggggaaggtcatcttgatggttcgaatcactggagtcgtagagagaggcgctcggggtggaaggagatttagaatccattttcggcttggagacgtctaactagacaaggaaacaacaaaatgttctaaccggcaaaatcaaatatttaaaaagaaatggcgggacttcacagtaaaaagagaaaacaataagaatatcaagatcagagagaatgaggcaaacctttattttttcatcaaaaacttcaaatgagaaattctcaaggggatggctcgctatatataagatttatgaaggcgcgtcgggtccgcaataaatgatgaaacgtgttagaagcgcgtgggctcggctgaaagagaaacgtttgcgtgatcctcgggaataagcaagaaacgtttctgcttcttaaaaaagagtctgctgcatgcaacagaagtttgaccgtccaggaaggtgaagcgacgaagtcacgacttgggaagacgaatagtcggcttggatatccattcataaagctcatcgcctctcccgccaaagtcaataagctggggggcaaactgttggggtcggatttcacccaagtaaccgagccgaccagaggaaatgcctaaggccaggaccgttggctcgggcatcatttcaaaggaccaccccgagcgggactcaaaacacctcgggcatcacttcaaagagccatcccgagctggcattgaaactcctcagacgtcactacgaagtttacccgagccggcctcgaaacgcctcatgcagacatcattcggctcatgcatacctccaggcgacgagccgcctgactgcggctcgaggacaacctg

SEQ ID NO: 28012 - DNA, 573 bp, Arabidopsis thaliana columbia
agtaatgggcgccagtgtcggcaatcacaaatttaagttttattattttagaaaacaaaaatattgatttatattataggggaaagaaaaatattgatcgctaaatacatggtatttcagatattagaacagatactagcgaataaaaatcagaaacgggcaatccgaatagtaaaaaacacaacctgaattatttttgatacctattgatttgaatggtggctgcgttttgcggtgcaggagaagtgcggtgcggttcaaatagtaacgaaaatatatagatacatatgtatatgtaaagattttgatactgttacagcactgttgcggtacggttttgggtgcggtctatgtcaccattaatggccataacgaaatgaaaatttcatgttacgagatggaattcagattgggttaaattcatgtagccataaaaaaattgtatgaaaatgtagccaaatttacttttcaagtattcattaattaagctaagagttgactttggcaaaataaataaatattcactaatttgactgaagataggttcaaaatgaattcataaaccatttgtag

SEQ ID NO: 28013 - DNA, 570 bp, Arabidopsis thaliana columbia
tagtaacgtgcgccagtgtacgataagtacgttgaaaacacttacctgaaatcagtgtatcgtaaaacactttgatgaccaaccacttctcagactactgcagccaaaccaggtttgcttctaccaactgtttgaatcaaacaatctccctgacaagacctgaaaatgaaacagaaggaaacccaaacacagcaagaagacaaaatctagaaacgtttttagcatacatatcaaaagataagattcgtccaagtagccgtgttaaccttattacagacccaagttttcagatgatatatatcatcagttcaaaaagaacaaaaacaaaagcatggtctgaaataaaaacaagcttgtcaaaaactagatttgaaacgttaaacaacatcaagctctcccacaaatcaatttcccccatcatcatcagaataagacacatctccttctgcttaagtacatgacttagtcaaaaatcacacaaacatcattagaaatataatatttcagaggaaaacagagaaacacttaccagcatctaaagccgtctgcagaacttcaatggccagtttc

SEQ ID NO: 28014 - DNA, 491 bp, Arabidopsis thaliana columbia
tgctcagtataacaaaacaataaattctgagatattcgtattccatccttcaaattaattattatattcttttccagagaaattgttcctaaaaaaaagattgcataggtcggttttttgttttgatttcgaaatgtaaatttattaacaaactctctgcgtaatcacctttaactaactctgtactttggtctgtaatgagtttattttactatatatggtatcttaattagtactttggcatttgtcaattaaaaagctacattactatttatcaaaactaaacttgcatttacacattattcttcctgactcaacgttaaaaaatcatttttaatcaatttaatatacatgcactgtattttcacaactactaagctactgaagtttgattgtttaagacgataatttgtcttttcgacgttataatattaagccacttacatatctatatatactaattacagatgtaacttaattatataaataac

SEQ ID NO: 28015 - DNA, 633 bp, Arabidopsis thaliana columbia
ggtcacagattatatatattgacatctcaaaaattaaccaagacgctgcgttttggagatattggatttcgaagacccggaagataagaggagaatagtcagtgactctcacgcacgtggggtttgaattgatgactctggtctcttggcctcgagatctaacttcttccgtgggatccaattttgagctgagtcatgacacgtgttacaacacgtgtgctccactgtgtcgacatcactcttgaaggtaagattttttggagtaatggcaaacccagagatcaacaaaatcaggtttgacaatgaaagctcacttatttatttatgtacttttccaataatttgattagtccaaatatattattctatttggatattcattcatatacataattacatacacatgcagtgttagaagtgagtttaatatggaagattcgtcgtctagtgtgacatgaaattccaccatttcatataattagattttcttcttatatatataattttatgcatctaatcgtgtggatgagaattgtccttcacctaaccaaccttttcgaagaaaaagagagatttgtttcttaatatatcttcagaaagagagagagattcgatgacaaaaaggataagaga

SEQ ID NO: 28016 - DNA, 437 bp, Arabidopsis thaliana columbia
attttattttcgttgttgtgagtataacattttttccttacaattccatatgtatcataaattcctaaatatagaaataaaaagtagattcattctacccaattggttaatactttttgctatagagtgactttaaactttaaagtgagagagacaagattgagagacaacaagaaggaactgtagaggtatcaattgatatgtgggcctccaacatagatgtttcaaaagcctttagttaatagagagatacttgaagttaatgggccattgtgtatattccttgtatatgggccttaaaataggtatgtgtggattaaatccaagaagtaatgtgaggaaaggcaagaaataatgatgagaagcaaagaatgagagtgatagataggtaagtagtgagagaatggaaaaaaagaaagagggtaagagaaacatag

SEQ ID NO: 28017 - DNA, 535 bp, Arabidopsis thaliana columbia
gtcttcaatgcttggctactcccgccttgcttcttcttatccaacaacttgctcacacaattatcctcaaagttaagcttttgaagagacccatttgaacttggtttcttagaaagctcactaatcaacgcagcttcagctctcataaaatgattcttccgcaaaaattccaaaatcgaatcgatagagctcgaatcctccatttccccaaatctctagaaacaaattttcacaaaacctgagaaacatttacacaaacagaaactccatgatttatttcttcgaatctcaaataattcctccctccaaacaaaaacccagaaagataaaattaagcaacttagtgactagtacgaaaattcgttagacagaaccctaacaaaagcatattctccttctctcatgaatattccccataaaaaacaaaacaaaaaacccagaattcgaagtcgagcaatcattttcacttacagatctaattcgagcagcttcaatcaatttcttgcaatattccttgttgaagtcttttgatttg

SEQ ID NO: 28018 - DNA, 473 bp, Arabidopsis thaliana columbia
aagtacttgagagtttgaaactcatacgatggttggacttagtcttttatatcttccgcaacttagtaagcttttgtgcacgacggatctgattcttctttgcttgtggagatcaagaagatagttgtgaaactcatagagattgaaatctaataatgccatattccacaaagcctactccggcaattaatctgttaatgttgccaaaccctagctatttatatcttttgatatatacattctttttcaccccagctattatcacttctctttaagaacgatttcgattctacatctggatatataattagaacaaaaacagatatatgtgtaccatggtttgtaaagtgcttgctagttgttagtttttgttaaatctgcatacacgacgcttggtattcaaaacaggaagacatgtatattcaatcaatggttacaacacgggttttatttagtataaaagttatatatta

SEQ ID NO: 28019 - DNA, 560 bp, Arabidopsis thaliana columbia
ccccacaacacgatcagtttcatcaacaagaatgcatctgcaagcaagattgaaaaggaagagatggatcaataaattaaggtaaaattaagtctaaaacttataggaaacacttccatcaaagcaaaagatcaaccatcataatcgtaaaattaagtctaaaaggagacaaacaaaaatatatccaaagaatccatttttggccaaaaacatagctaaacttgactatgttcctcccaaaactatgacatctttcacaggagacactaaagcgttgactttttttgcttgattccaataatcagaaaaggaacccctgacaaatactaaatccaaaatcctttacttttacatcaaggtcaacaaatcaatggagccaagttactattacatcaaagtcaactaatcaacacacctaagttcataaaccattgttaatcgaaaaaaactccaactcccataacctaatttagtcaattttccttccattttctcaccgaccaaacgccgaagacaaaccaggttcgagaacacaacttaaagacaaaggtacaattttg

SEQ ID NO: 28020 - DNA, 469 bp, Arabidopsis thaliana columbia
tctgatgtcggagaatcaatctctggtgcatagttgttccagtgaagtgaaaaggggaatgccgatgagccatttgactggggagtgactggtggggttggtgcaattgctttggtttcttctgttggactctggacttgaatccaccattttgaattaaccttacattcttcgatccagtccagagctgaagaagcaatctctgttcttcttctaaagagaaaactgcgactgcgcttcacctcatttagttcccttaacactgatcaatgaaaccaaaggtgcgtcatgtttataagggtaaaagattgtcatcctaacaaaaattggttctgatagatttggtctgcaaaaatgggttcttggcatcctaagactagaacttatgttatcacagaaaaagtcttccaaatctatgtgacagattcatttacagccttatcttttataaaaagaaaatgactctatg

SEQ ID NO: 28021 - DNA, 741 bp, Arabidopsis thaliana columbia
gagagagaataaaatcgaaaaacatagagattcaacatatcacgaagggtttttgggtaaacgataagagacacgatcagaactttactctgtagagatagaaagagagagaagagagaagcaaagataatacagtgttgtgtgtctctttcgtattatataaaattcatagggaaaaaaaacagagagagattagaacaagttctgtatctgcaaatttctttttaatatttcgacggaaaaatctcagaagagagagagagagagagagagagagagagagatggtgatgatgtggagaagctaaaagggaacaggaaacgatggagtaagagacgagccaaagaatccaactctttgcttctttcttcctctccacgcgcttctttcttcgcgtgtgtttttcattttcgtgtaaaacgacgtcgttacgtttatttatgtttttttttgtttgttgaccaaaaaaggattagaatatacgaaatcttgtgaaggcggttttgtcttaagcaccgagttggatcagaagaatgtcttttttaacattttattctttaattgtatctttgtttgtcgcatttgcataattgtatagtccaatattcgtaatttaccatcaaatttattaatggaaaaaaataaagaagttagtatctttggtgtgttacgagactcattatgtgttcaaagttttggtgatattcataaactagattagtcggcgttaatgttatattt

SEQ ID NO: 28022 - DNA, 359 bp, Arabidopsis thaliana columbia
ggataataaataaataacagcccgatgatgatcatcatctacctaattagagtttcattgtctctgtattttcaaattctctctcttatgttatgtattccgttggaatggcttctccttggcaagattgaggctctttataggaggattgttgctagccctagtggaattactagtagcccgtcacgaagttctagttacatgttacactgttgagagagatgtattatctcaataaaattttcagattgctctggtttcgagataccacagcacgcttttaaggaactcacattacgcgaaaatgggtattgatgcaagacaaaaacgaaaaagtttgaaaggttgatggcgggtgg

SEQ ID NO: 28023 - DNA, 484 bp, Arabidopsis thaliana columbia
cggtagtgcaaaacggaaagttgaaagtttgtatgatacagctagtggttcgagaaatgctgacacatgttctggggatatatcttctagtgtttcaaaatctcctattgttctggtgacttctgtagatgaagaattcatggatgcattacacgaagcagaaaaaacaaatagcaagaagcggtgggctgaaatctaacaaagatgttattgttgatgatgaagatgacttttttgtggatgaatttttgtcgacaacacaatatagaggaaactgaagatgggatagatatttctgatgatactatgccctgtggcggatttgataaagagttttggggtaatttcctgtcggatgattatggtggctcaaatgctgaagagttgatgtctaagggtggagtagatgcaaggtacaagggaaaaataatacacaagtgagttttcagggttaaatgataaggtagcaccagtgcggataaag

SEQ ID NO: 28024 - DNA, 776 bp, Arabidopsis thaliana columbia
cagatatctaatacattgtactataatatatatcacaaaataagaaaataatctacattgaattaaaaatataaaatcccgcacgtacggatctagtatattgtaaacatcaacacttcctcacctacgactacgatcacatggagtcttaatgttgagatagtgtcttctaatagttttttttttctgaatactaggaggttttgggccgaatcccgtaatccctccaggcccgaaactacagcatgtaatattagtttcgtctcaagcgtcactcgaaccgacgacctctaagcttcgcatgggatctttactaattgagctaacgacactaatattacgtaaagtgaatgaaacctaaaaaatgcaatgcaacaatatacactaaatatgattataaagtgaatgaaaacagtgaaaaatattaacataatgcctttaaaccacccaaaaaacacaagatatctgtgttcaactaaaatcttaggaaagttttaggacgttcgtacattgttaaatctcgttaaaagttattatgtcgtttgccttttatggtcttaaacatattcttcttagtttaatttcgaagaagacaaaaatatcaataaaaatcatcgagtgagtcactcacttctgactgtttgttacaatatatatttcatttacatagttatccttgtatagatcgctcgactgatctatggctggctatacagatattggttttatttcaacaaaaacaaaagtagtattaacatagggcattattttagtta

SEQ ID NO: 28025 - DNA, 532 bp, Arabidopsis thaliana columbia
cccggcaagaaaccagtttaagagataacgattagattaacgagtatttggacaaaatactaaaaccataatcgtctgtgcttagctacaaacaattataaaacctttttcgattttaaaaaaaaaatttgcagaaacattcatcgacaagaggatttcttcttctgagtcaattggaccaaaatcagatgattggaaatgatttgtaccttccatagagtattccgatcagtcagaatcaactggtatgatattgaaatctggcttacgaaaacaataaatcgaaatcgaattcgattattgtagagatttgggggaaatgactatttggtttttattttcagagaggatagagtcgccggagtcgcggattggtggacagtgacggaggagtcgctggagtcagaggagtggccggattcgcttctcgtcgcaatgtggagaaacagtaaattagggtttttactgggttcgtgttttttttatgatcgtgataaaagaagatagagaaaaccggttatatttcttaggt

SEQ ID NO: 28026 - DNA, 864 bp, Arabidopsis thaliana columbia
tcaaaacacacccaaagacaacagaattcaaacacgatacaaaaaaaagaaaaaatcacatacatgcaaagaaactcaaaatactctcaaacgcaacacaaaaatagacacaagaaagaaaaaataataatttcatgattaatatttttctttattggtaagaagaactttgcgattctattgccaagtcaattttaggtgaagtattccccttcccatttctgtttcttgtatttaatctctttgttgattccgaaaatcacacaatgaatttgtttaaaaagggtgaaacaaattcacttaactctcttgctattttgtaatcaaagacgcaatgaaaaagatgaataaaactgcttagagataaagttagggtctttgctctagaacaagttagaaaattaggttttttcgtatgattcctagaatatgctaaacactatgattcctagggacaaacccctctatttatacactattaagacggtttaaagatatgctaaacttccacttcttcgaggcttgaatcatctaattttctttatctctgaagacttgctatttccaaagaggaaaacatctttttcttcaaagtaggaagtcggctgggcgatctccctacttcgggttaaggtcgtcgggcgacctccttattttggcccattaacaggctaaactgactaaaatctcagtttaattcgtaattcttctagtttaagtcggtattgtcgggggtgctaattccttcacaaacaataagcccctcccctagttcgggaattcgaatgtttatttcgagttttcaaattaaagaagtgaatatcggcttatctttaatgagatgcgattaaatttgaccgttga

SEQ ID NO: 28027 - DNA, 903 bp, Arabidopsis thaliana columbia
  unsure (1)..(903): unsure at all n locations
agcccaaacggcaatggatgatgggcttacaaagactgcacggttacaaagggaaacaaaaaaatcggcgaaacgtctgatgactcgacatacgaaatgctcttggcctcccccccccacccaacacaaacgtacttgagtagattaaattttctaatttggatttgaggagctaaccatattattgggctaaacgttttcaaatctaatagctatattgggatcatttctaacaaataaatatattcattcaatagtaaaaaataactaaaacatactaaaaagagagaaaaaataaaaaaaaagaaatgttcaatgatcattattccacccaaaatatcattttttaaataataaaactgcttacctaataggctgaggtgattttgagttttatggggtaaaaaatattaacgattttgagggtcgatgatctatataattctttatttattattattattacactcgcgggtgngncttagtctgatgaactatgcatattaccctttaagatttaggggcccaagcaaatgttttgtctggatctccacatggctggcctcactaacatggagacggtaactgcaagtgtaacttcattttttatttttattagtttcacctttattgtaatatataccatttagtgccaaagaggaaatcaatataggaggagttttaacttgagttttcctatatacgcatttcatattcattttagcacaaaactcatttagaattatttgcatcgtgcttgttttgttgtacgagctagaaacatcaaacaatatgattttactactaagcaatccattataatgaactactaccatgtctcatcccctaatattttttttttttaaagagtgttcaatagttgcctatcatatgcaaaatgaa

SEQ ID NO: 28028 - DNA, 554 bp, Arabidopsis thaliana columbia
cttgagacattgaaaatcagtcttctaaagaaggagagtaactggagcttgaagaaggagagctttgctttgatggtcgaatcgatgaggtcgcgtcaaaatctgtaaaccggaatctgatccaactcgagaatttgaaacgatcaggcagttggattgggcctgataggctattaatatatatagcataaagaagcccaattatataaaatgtccaaactcatcatttacacatttggttataaaatacatcaattcagctgtaacaagtggtactgtagtacataattttaataatttatcaaaattcgaatttccaacacttaccaatttcacgagctactcacttaaaagctatacttttcgatgattaaaaaaaaaaagctatacttttcaaacttggccacacaaaaggcttacattaacccacacagagtaagtgtagtcagaagccaactttggtgggctttgccactagcctataataccctcggctaacatatgcttatcctctaccagtaaacattttggaaagaaaaataaatccacaatac

SEQ ID NO: 28029 - DNA, 943 bp, Arabidopsis thaliana columbia
attccaattcctttcagaaaactgaaataaatattttccttttgaatttaacagatacaaatgaaataaatccaaaatatgtaaaatacatattatatatttcaaaacaattaagggtttaaaggcttttacataatgtacgaaattttatcctagataatgtaatttcttgcagtttaccggtgaagcttacctgaggttccaaaatattgtatacagaaccgttcatcgtggtctcctgtcgtacggagagagcatattcatcgcatactgcagaaccgtaacatcttgatatctcatttgaaaattctttctatagcttcgagagatacatcacattgatgattttgatatttttctcttgaatatcttccttttggtttcgttgttggaagtcgatccgttcaaaagcttcaaactttctcctgaacttgctttcagatttgttaagatcctcataggtttttttacttcaaacttttcctaagtcttaggtgttaagaggcccgtctcaatatatttataagcctttggtaaaatccaaaataaatctaagacctcttagtaatttttttttgaaataaaaatggaccttttttctttaagaatttttttgaattttgtaatggacccatggcatttgccctactctgccatgggtcagagacgggcctgggtgttaagaagggttttcaaagccaaatccattcaaaagcttcaaagtttaacctgaacttgctttcaaatttgttaagattctcatagtttttttttacttcaaacctttccaaagccttaaggaattgatgcataagatcatggacctttttgtcagcataagtgcacattgcatttaaaattatgaggttgattagtgtcctccattattcggtgatggttgatgatatatggtagtgaatgacgatatactagtctgttggtg

SEQ ID NO: 28030 - DNA, 427 bp, Arabidopsis thaliana columbia
attttatctcttcaaaatcactcaaacaacttcctaccattctcccatctttttaatttgtatgccttatacttaattttaattggttcaatcgtcatacttcatgaataagatgtttccttcaaatatataaacgatgcagtgtgtaatttgcagtcggtgtcggatttcgcacacattcgactcaacgaaattaatgttttgaaaatttaaattggacatcgaaaatttatattcattggatatatgtgtgtcccaaataaaagtaaacaagaatgtagaacacatcaaaataattaatatcacttatcctgcaacaaaatgagaaaacaacaaaattagaatcataaatatattattcaaaattatacttagtaaatttaaaggtaaaagatcaaatatgacttgcttttcaaaatgttaaaac

SEQ ID NO: 28031 - DNA, 513 bp, Arabidopsis thaliana columbia
taaacaaaacttttgcactaaatgcttttaaatgtaatttattaggttaaggctatttttctatcacgatgaataaataatacatgcaaaagtgctttcaggtacttcattttgcaagtactagagataaaaacatttctgttttgttcttcaataaagtatttagtattccaatccacaggaggtgatgctgttaaaatatctctatgaaaatgccgcaggactgccaaattcatttaatttgcacctcttaccagcattttctaactccctatttatagatagtttcaaatgcagatttcaggataaacttaaacattaaggacctgtgttgccaaattgaaatacagttgttagaggaggaaatgcagcaaaagtgttaaatttatagctttattttcttacttattcttaataaaattgaagaaaacattgaaattttgtgttgggttttctcttcaaagtaaaggggaaaaggaaaaaatactctgacaaatcctagctttagagtac

SEQ ID NO: 28032 - DNA, 495 bp, Arabidopsis thaliana columbia
gagaaaaaataataatagctcatggattagaaagacatcagtcaattaattattatgacgctatatttataaaacgcaccattaaattaaagagtaacaacattacatcatccatgactgtttatatacaactgctatgacgtcattttaaacttgatcatcactgaggcattagtaatttttctgtcccaaagatcgaacatttacacttacttacacatgagtaaaattgtacataggaagcaaatcatacgatctcaatacatccatgacaaatcttgcttaaacgagacagacgttgcagcaccatgaacacctcttcttgaaacctgaggacaatcttcaacaacaagcaactccaacttgtgagatccaacaagtggtctcattccatcgtctgtcactcccagacattttgataacttcaacacattgagagaaggaaactggctcaccagaatcaacccctcatcgctcacgtcttggcaatggaca

SEQ ID NO: 28033 - DNA, 537 bp, Arabidopsis thaliana columbia
ggtctagtaaaataggatgattgaattattgtacttgtgataacaagtaaattatgagttatatgagaaagtggaatcacagtggaaaagtggaaaagtggaatagtggaaaatggtctacattgaattgacgggttctttgtagctcaataaaagactgacgagtccagtggaataagattggttcaaaggtcagggaaatgatcgaacctggtattgatgtggagatcttgcttaagcaagaatgagttgtgtgttatagttttgaatattgatgcaaactatatgagtgttgtgtctgtttctatgtgattattgattgttgtttaaaggtagaatcgtgtatcgtatttccagtgggcggaaaggatcctctcactgagtaattctttactcatccctttcttttccctttttccccaggtcacggtgagaattgtgtgtagtcgctcaagtctgtcttgttattttcttatacgatttattaaatagttttcagtgatttaagattatttttaagacaattttgtatttgaa

SEQ ID NO: 28034 - DNA, 592 bp, Arabidopsis thaliana columbia
tgttttcaaatctaccaatctctttaacattcattagttctagaacgtgaatcaagcaatgcatcatcaatgaactcatttggttaaggtaaaggtcaagagacaaagatgatcccttacagaataggcttcagtaacaggggatctctaaaaaatgattaaagctttagtagaatgctaaaggtaagtccgaagctatgcatacagagataagatcccatctacccagagtataacaaatgaagctctaatggtaatcccatctccaatcccaatataagaacttaactctactctttgcattcatgaatcttttaagacatttttctaatcattcttttcttttctcttaactctaggagaagctttctcaacactgatacatctagcgaatttggatttctttaacaactaagggttcctgtttttaaaatttaaaattaagggcttttgccttcttcattagctaacaagaactcttttctttacaaatcccaaaacatttattagactttttctgcttctttagcttacttcacctagagtcttttacctcttttatcaatgaatcaacccttttttttttttagac

SEQ ID NO: 28035 - DNA, 580 bp, Arabidopsis thaliana columbia
caagcaaaccacagcatggctctactattgtgataaaaattttcatttttagaaagcaacatgacttttcctttctcaattctagcccattatgatttatgtacatagatatcttatattttttctgctaacgatgcagaatgcagttgaaatggcaacattcatctgattcatggtaaggccacagtctaaattatgtgcatcaatccttaaatcagctatgtaatgttattcagaaaaaactttcatttaatatttcggtggggaataaaagaaattttttgctttatgaagaaccatacgatgatataaagccgactaaagtctgggtgcgttggaagtacacaataatttgcagcaacacactatctctaatcgtcactctcgttagtctaaacttttcagatatctacaagttccataatcttaagcttatcaaagtctatgataaaacatcgctctgccaggtcaatacaaaagagtcggagattccgaatcgacttctatgtcatctttcccatcccactggcggttaaggcgctgtatacacatcgttcccaaaccattgccggttaaggcg

SEQ ID NO: 28036 - DNA, 1005 bp, Arabidopsis thaliana
tataagattcaatgttttcaaatatcagaatataagtatctggtgctgtggtgtagtggttatcacgtttgccttacacgcaaaaggtctccagttcgatcctgggcagcaccattttttactctcagagatattaaagaaaactcatatgttcttcgtatcaccacatttcaaaacaattaattttgtgtttctgactaagaattaatcaaattttcttctattctgccaactcgtaagataaaagtcttccaaaattctagtgcacctaaacttattcaattattttcaaagaaaggataaaatagaattaagagtgattgaagatgcaatctaaagggagtgcagctaagtttggttgtctcttttatgtttttttactccttccaatatctgcactaaatcttttctcccttagaaaaccatttattttgacacgttatagggagaaatttggacaaatactaaacacaaaagcaaaccataacccatagctaattacaagatgcaacaaaagattatttttgcacttagctaaatttgtgcagaagaaaggtaaagagaacaaaccaaaaaaggaaccccccttccttaaactcccttaggctttgatatggatattacccaaagggagttttacagaaccgtcctccgaagatcacataacttaaccataaccttttttaaaacatatcaaaccccttgggattgtgctaagaatttgaagggtctttaaggcaacggaaaaatatgcagcagctaacccatacagcttagaaaatgggatatgaaacagcttaggcttcgttttggttactagcaccatcccttgaacgaccaccattacccatccttccacgtccacgaccatatccgcctctacctccacggtatccgcctcggccacctccataaccatcacttttacccccaccatagccatcatatcggcctccaccatagccatcacgtcttcctccatcatacctatcaactcggccacca

SEQ ID NO: 28037 - DNA, 880 bp, Arabidopsis thaliana columbia
atagttgtgccttcacgttttgttagagcttctcacgttgttcctcgagacttttgtgtataaaagctgaatcaactatgcctcaccacgtgtatacctcttattcgccgttggatggaagcgttattgactaatgcatttgatagaaacagatgaatgtatcttgttttaaaattttaaaaatggtacaaagaataatatttggttgatttttgataaggtgtgaacggacaagtaatccattcgtggtatccacttcttgcaaaaaaaattcatttgtcgctcgattgatttgtgttctgatatgtccataagaccataacttatagttttcttttgtcggtttattttaacagaaagtccatgtataggtaaactaggttcgggcgattagaccggactacaaactatgtattttgatgcatcacttgatcatgttttgacaatgtttttatagctagagcaaaatgctaattggaaattttataaggttatagggttgacccaatctcggttgaatgagttataaatttcataatttgttataaaaatttatataacaaaataatttcgtgttccattattggatttgattctttgagtagggttattgaatttctaaaaaaaatattagatgtttctaaaaagtgtatatttagaaaatttgtcaaaatatttgattttgttttgttatagaaaattgaaagttgtttgtttataattagataaaggtaaaaaacattgtatttcaataaacctagaatttaatagaattaaaatggatactaaacttataaaataagacatgagttcaattattttaaagctctgaagtgaccaaaaaccaaaatcaaatcaacctatcaaatgaataaaaaaa

SEQ ID NO: 28038 - DNA, 478 bp, Arabidopsis thaliana columbia
accacatcaacatcagagcctacgttacgttgctaatttctttatctttgtctcttctccttattataataactcgacaaagcagcaaaaaagtaaaatgtcgacaaatatagaaaaacaattgagtgacttgaggcctacttttaatggccaatgaatgctacatgtccttgattacgactctaaatcctaatctcttctatttcacagttccgtgccgtacttctctccctcgtttttatcgagtaaggatagatgattgatattcgtattttgaacacatatttctctctcttaccaaaaaagtttcggacctatactaaatggataatttagttttatatctcataaccagttctgccaacttatatgtgattgtatattgcataaatacgttacatcaagaatatgtatcacagtcatcctgtgggatacatatgaatctaacaaaaaacagaagttatttttgttttgaaaa

SEQ ID NO: 28039 - DNA, 557 bp, Arabidopsis thaliana columbia
gttcctgaatcttcagtttgaattgaagatttaactatacaaagatcagttcttgcaagcaatataaggagtaaagtctcttatgtattttcttaatgttgaagtaaaaaaccaaagtggataaacaaagtttctttgagtttgcaaagtacttttctctcttaccatatataatgctgatagtgaaatttacttgagaagaactcgatgcataataatacactgcaaaagttaaagcctaaagagcaaagttcctataaaaagtaacacagttaaagtgtttaaagttctctatttacagcttagacgaaactggctcttacttccattgtagaatattggtgttgttgaggtacatagagcagaagcttaatgaattttagttgcctgtataatctatataacatacactatgatttggttttgttctggcacacacataagtaaaaatcgtaaacaacgaaaaacaaagattcgagagtggttgtaaggaacaatcttgtatcggtgtgataaatatcgagtttaagcaactttgttcaccattcgtagatgtt

SEQ ID NO: 28040 - DNA, 568 bp, Arabidopsis thaliana columbia
tcttcacatcatattccatagaggatttgctaccaaagagatcgttggcgaccttgacttcactacctctggcggcgacctcttctcctacctcttctctgggaccccgtctccacaagtacacaatagatctctattaggcctgaattttaacattacgcttctcataatctggtagctcaggtttcatcgctagcaaaagaaacaatgatggaataaatacttgatttagcaaatattagcattggatgcctaattaccactcattaactgaggtaaatataacacccgtcccgccatataggccaaaacggcatgttattcatctgatcttgccaaaatgttttctttaaaattcacatacgaacaaaacattgcacataactcctcacgcttactaacctgaggaaaaaaaggaaaaaaagggtgaataaagaatacttagtgaggggaatctactctgcccactgaaacatagaacactttctaaagctatacaatgatcatcataatatataaacgtagacacacgcaatcaacctaacatgttttaacttctaacaacaca

SEQ ID NO: 28041 - DNA, 947 bp, Arabidopsis thaliana columbia
tggtaggttgggcattctattgggtcttatatatcccttgagttattgaagaaattctcggacaaggtatagatggcttcctctaagagtagtactttctccatcacaatttctttcagtgctatgtgatttttcttatattattctctggaatgctttgcaggtggtatattgcattggcctatatccatttttgactttgaaccaacaatcaacaaagcaatcattaattggcaaacttgcagcgtgacgttttgttctcaatacgaatcctcgataggaaagaaccaatcagtctttatttagaatgttgtgaaatcgttatcatgttgtgcaggtcttctgttctgtcggctacagcaagttttctgattgcatcgctgagacttttacctatgtcagctgcacggctgcttgtatctaaatccattggagcttcatggtctgatactgctgttcaagctacctgcactcacttgaggcaggtattgattatctcatattcactgattttcttgggttttacacttgaacctagttgtataaagacttgaagatggccattacatcttcttttcttgatactttaagttcttattccctactaactattcagacgacttaacttcatctgatgcttgcagtatcacaccatgcgcaatgttctcttcatggcaaagtcagagtttagagaggtactcttctttcaacaatgtgttgtatagagtttagagtctcattttgaattcaaagtatgcaaagtgtttacttgaaagctctacaacatgaccaagcttgccctatagttgatctccaactaaagcattctaggtgacgatccactgtttcatttttggcatataagcttgcagcagagccagattgggatttcatgagagaaaaccagagcaagcttgcatttttatttggcattgatgatcattggg

SEQ ID NO: 28042 - DNA, 756 bp, Arabidopsis thaliana columbia
ttcaaaaacttgctatgtcatcagtcagatattcaaatcataccgtcgaataggagcatacacaaatatacttcccaatagcgtgcctgctatgatagtgtcatcagctgtgtcaatacttgtactaagaccataacttcgcagtacatcatcagctggaagtttgtagatgttgcaaccctattaagaaggtgggtgcaagcagaaatgaattgactatatatgtatattttattggttaatgaggtaactgcaatgttgtaacaagaaacttgacaaaaattatccatgaaaattcctagaatagaaattggaattgcaataatttcattcaaggtaagctacgttaagcttgagaaatgttagaccaatgcgccaattagtctttttctatggcctaagactatactttcttatagaaggtaataacataagatcaagtttcttacagtataagcacaccactgaacagaaagcaattaagtgaaatgatcgctgcaagtctaggatttaccttttttatagacatggcaatctctcccatgtaataagcacagtttagattcaggttggactccggacttgaatattctggattatcatgaggtattttcacttagcaaattctactgaatcataacaatcagcctctataagagtattttcgaatccagggtttatagcacctagaagaatcgtaagaacaaggaagatcacaagatcacacttttctaactgaagtgaaaattgtttgat

SEQ ID NO: 28043 - DNA, 599 bp, Arabidopsis thaliana columbia
gtacgattttcagtatgcatcttattagaataaatgggttgactggttatcttggattaacctgatcttggtttaatgttgtaatttagccttgtgtatataagctttttattttatttggtcaaaacatttatcctttcatttaaccaaagaaggatatagagtacaaaacatcaactctaatggtttgatgcataagacaaaattagagcaaatttacaacaaaggtagctagaaagattgagaaagtcttaaacaaaagggataaatccatacgatcctacacagaagaaggcaatgtcgttcgtcctcgataaactcatcggacaagacgcaagcaacggtcatcgccgacgaaatccgtggaaaaggtccttcttggcaatgatacctcatataacatattaacatcctttatgtcagagctagaatcgaatctgagatgtggaggcgattgaggactgtttatccttgaaatcgatgaaggtaaaaacatgtgtataacattctaaagtttcaatccgagagcaatgtttcagcacaacctaagtaaggttggggaagcatattgaacattcttcaaagagctgttcgaggtg

SEQ ID NO: 28044 - DNA, 592 bp, Arabidopsis thaliana columbia
ctatatcagccttggtttggaaatgaaatgcatagtcttacaacgtaaaatggcatcaaacttcacgttgaaacctctacgaaatattatatgtaataacaagttggatccaaaagaaatcatatacccaaattcaggaaatggaattggagatggtaaagagctcgtttagtcaactgaccataagaaacgacttcccagcaggcgaagttatatttgcaaaatcttccacaacattttcgttttcaagctcctctataacatgctgcaaacatggaaccattaaaccaagcaattcgttttcatataaacagaataaatgttcattctttttcagtatgctgcagtaacaacttactgctgtttcatcattgccaggtgtcacagtcccttctctatatacgagatttcttaacagcttaaaggcgtagtctatctgcaaaacatttagtagcactgatgatattaacaacataaagctaacagatttagcacacaacaaactgacagacctctataaaatctgatgagcaagtatacctgaaacagatagaaattgagagaaacagtatgaagaatgatggtgaagaag

SEQ ID NO: 28045 - DNA, 623 bp, Arabidopsis thaliana columbia
gtgtagaactcattctcggttcgggaacgatagacgagaagggaaacaaccagaaaacaagaatttctcccggaaaaatcaaaaataacaaaaagaacgacggagcttcaccgaaaaagaaaaaacgatagaaatatcaagatcagagagaatgaagcaaaccttgtttattttcttcgaaaacttcaaatgaaatcttgaaggagtggctcgccatatataaagagttttcaagggcgcgtcgggtccgcggcaaacattcaaaacgcgtttaagcgcgtcgggcttggcagaaggaaaagatccgcgtggtcctcgggaataagcgagaaacgtttccactcctcaagaatagtcggcgacacgcgacagaagtttgaccgtccgagaagatgaagcgacagaactagaagacgaacagtcggctcaggaatccattcatgaagctcatcgtctctctgccaagtcactgagctggggggcaaaccattggggagctgcgagccaaccatgtttcaacgcctcaggagacatcgaagagttatcccgaaccgggccacaaaacacctcagagatcgcatcaagaatccataccgaggcgatatcgagaacgcttcagagca

SEQ ID NO: 28046 - DNA, 530 bp, Arabidopsis thaliana columbia
gtgcgacaaggcatccaaatatccggtggtcatctctaggtatagtttttttgttctcatattgactatcatcttttattattaccttcattcttgagtaggttgttgttgttgtggtgttaccatagaatttcttttcattgcaaatctcaagaaaattcgtaagggtgtggagagaagccgaagtccgtcaaccgattttgctcctatattcatcataaggacattaatagcaatcgctcaccacctgatttagaatcaacaagcaggtactaagatgaccccggtttagaaaccaaatgtttcctttggttgggtgcttaatttaaatagctagtccatagtatttgcagcgattccctatttgttgtttttctgcttgtacgtgaaagagataatatgaaatcgaaagtttatgtttttattttgctttcgccttaacctttgtgattacaagctatgtctatttatacatctagattgatttacctagtgcttcttggtttgcaagctgcacttggctgttatgt

SEQ ID NO: 28047 - DNA, 990 bp, Arabidopsis thaliana
ctgtagttgagtaaccagacaatacaagtttgcatatatcaactgtagtggacacatgatctaatgcagaactaagatcatgtcaatatacctcaaggaagtatatctatctatatatcagaaagtgtatctaacagttatgaacacaaatctaccttgagaagcaaatcgagaccaatgacaagccccgagatgaggaaagttcgtgttaatgcttcagcaccgcttgcatagtttccttggaagagaaaggctaccaagcttacttccagaaacaacattccagatgttgtgaacaaagttaacaaattccaaataacttctttccccggagtgcattcccatgcctaaactcatgaaaagtaaattcaaaacgaaatctggagtaagactaaatcaggtaaaacatttcctgttaagcagcatctaaccaagaaatcaacactaatagcttacacaaaatacaaaagctttctaatcaccagtgtagaataaaaacaatgttgataagatcgcaaagtttctacatttacagagcctaaaacactctaaaaagcattcttcttcaatctaagttctgatctctttacacgcaacataggtatgagttacttgtgaaatgaatcgaagtaaagaagagaactttaacaaacctgaaggcaacaccaagcaagattgagcaagctaacaagccaaagaaaaccataataggcaatcataatgtaagatctccgattagacaacttggacaagctcttcttcgcctcgtacgctaagtaagcgacgaatagaatagatgctaaaaccaaaaccgtgttatgaagaaacccatgacacttcccgacccatccgccgataaaccctccggtggccgtcgaatcagggcttagctgagaaatcacgaacggtgactccgcaatctcgctgagcactcgcatttcatcaaattgtacgaatcagaaaccaagtagacttagcgcaaggagcgga

SEQ ID NO: 28048 - DNA, 1288 bp, Arabidopsis thaliana columbia
gttagtttaactttgatgcaaacaaaaaaaaaaaagaaaaaaacgaatcaaattttgtttgttaaaactaacccaacttataaattagatttataaaatgattcaactgacgaataatatactatgaaagaaagacacaactcatcaattctctgattaagaatgacccaactaacaatatttatacgttggtttacgccacattgtaaaacaatcgctgctctcggcaataagtatctggtgcatgcttctgtaaaccgcttcttctctctgaacgacaaagaaggcgattacccaacaaagcaccctttcgttaattactttctggccggcgtcgtctccggcgtcggccatacgtcctttctcttttgtttgcagtttatttattcaaacatcttcttcagtccaaattaatgatgggggtctcgagattgatgatgagaagagatggtttcacctacacttaaatccacggtgcctgtctcaaatctatttccctgactcgttattgagtcattctacccaccaccatataaatttggtttcgatttcacagagtcatgttggaaaggcacatcccttgaagatggaccaaatgcctcgtcggtatcgcaaccgtcgaaaaacactccgccttgctacaaatactactctctcttccataattatgcgattttgttggctcctcgtagccatctatctctcttgtagagcgtttttccgacgtccactactgtgttattgtcggcgttccgtctccgattgcgttccatcttcttcttgtaaccaattagtgatcattggtccacaaatgaagtggcgttctcggcagttgtcattttcctccgccaaatggtacggagatgtaatttggatatttgatcctggtatcattggggctcagattgacaatgaaggcgacttgaagaagtgtttcatacagacactgtttcatagcaccggttcgagacaatccataaggatatggtggagagagatcatgttgtctttgattctacgaatatacctcgacaaatttttgccttggatatcattatcgatcaaggaagttggggagtcatcagtcattaacttcagcctttggggatgtctacatggaacgagatttagaagatggtactcaccatttcaaaagttatcagcattggctataaccaagaaagatgtcatcgtctctagttggagatgttttaatgggatgcgatgtaacagatggatcgcaacaataatcgttttaaagtttattggagttcgtcaaaatgatgat

SEQ ID NO: 28049 - DNA, 785 bp, Arabidopsis thaliana columbia
tataaaaagatgaacaaaaccaaaagataaatttagtttaattcatgaagtgatccaaaacttaagattcttctctagaataatttgaacatcataacgaatccaagaaaaaaaaaagagaaaagaatattaaaaaatgctaaagaaaatgaaagatagttccaaaaatatttaaagaaacataaagggaacagaacaaggagaaaaaatgcatgtagagtgatggtcgagctgaatttggaatagccaagaaactctcggctatcatgtgaccgagctggacctgagaggaagtggtcagatgcaaaccgtccggttcaagaggtaggcctctggcgtcaacgcaatacacgttctcaagatcagtcttcagttgagcttttctcaccgcgtcaagatatggtcctgctcctgtcgctagagccaccttttgttgtttaggtcagaacaaaaaagatattagaagaatgtaactatatatcatattctttctaaaattttgaagtaaagaccaaaaatgtcaattttgaaacaccctgtaagcttggattggtacgatatatttagctacagcctggattaaaacaatgactaatcacgaatcatggtgggaaggctaaactttaagcaaatatgcatctaatacgttaaatccatgcttatgtattctttacttttattttgcatgtattttgtcctctgattttccgaaaattacccatcaaagttttatttcattttaaaaccgtggaatgacactttttggttaccacacttgcagaatc

SEQ ID NO: 28050 - DNA, 585 bp, Arabidopsis thaliana
cattatggtatttatactttataaaatgctttaaaaaacatataaatccctcaatttatcaagcaaataaaaacctgccacgtatcatcttcggtttaatttgcagtccgcggaaaaaaaaaggagactggaaaaaaaaagtcacagtctgtctgtctgtctctctcctctaatcttttttatccgctagggttttgaagcaaggtttctcgcgattttctcgatatctctcgcccatggcgaaaccaagtcgtggccgtcgttccccctccgtgtctggctcgtcatctcgttccagttccagatctcgttcgggttcgagcccctccaggtctatttcccgctcacgctcccgttctagatcgctctcttcatcttcatctccttcgcgaagcgtcagttctgggagtcgcagtcctccacgtcgtggaaaaaggttagggtttctttcaatcacttaccaattgttcgaattggatttgtgtaatttcgctttcattcttcttggttcgttcagctcgaattcgaattgatgttctgatgtatcttcttgtgtagtcctgctggacctgctaggcgaggtcg

SEQ ID NO: 28051 - DNA, 527 bp, Arabidopsis thaliana columbia
gttttattaattggaactaaaacgaaacttgagaaggtggaggactgtttgatttgcattgctgttgatgccgaagcttaatgtctcatgttaatgtagttcacaagatcatggtatggttgcattgtgagtgttgtatcatttaattattagatgatctttgtgtccttggttttggtttatctcaaggctcaagttctactttgctgcagtaattcatgtcccagctaaggcagcttatctgtcctgtcaccatgacgagaaaataagtctatcctgagttccgacataggtcactctttggtggtcctttaccttactccagtttttaatttgaaacttattttccaaaattcaataaaaccaagtagatttgatgaaaatgtaaagttgctatagattttatgtaaatgtagcttggtacttgaaaattttgagaccattttttgtatatctaagaaactgtggagagacagtaaactttggcattttattggtagctttgaattcatgagattagttttggc

SEQ ID NO: 28052 - DNA, 284 bp, Arabidopsis thaliana columbia
tctaagttatcctcaccctataacaatgttaaccaagaacttgtgcatagataaatccaactaatagacaacaagactctagattatcaattagagaacaaaccattagagcatgactctgacaaagcaattaggtaacaatatgttccaattacaatcagcagcacaaaatggtgttgaaaacgatccctgagaatcagcagagactcagacctacataaagtcgagatgagttacaattcaggggaaggagaaagaggagatttttaccgactttgagagaa

SEQ ID NO: 28053 - DNA, 656 bp, Arabidopsis thaliana columbia
taaatttgataggcctttgggctttcatgaattgtgaatgatttaagctcattcattacctgtaagtctataacacaattaggacatgaacatggtaaacaaaaaaagaaaacatcatgctaataataagtcaatagagaattagagatatacaaccacgagcccaagttagacttctttaataatgggtaggctcagaccatcgattgctttaggcctgggtaaataaacctaaccaaatggatactaaaattctataaccgaatgaaccgaaactaaattagtattgaaccgaaatatttatttataaaattcgagctcagactcgcacttaacatctagcccgaacttaaacagaacaaatcggttgtgacgtcaggtaaaaaccagtccgcccgaaagctgagctcgaagcttgcagatgacttataatttagtcgatctaaaaacctaatttcaagattaggaatccgatcaggttaatacataatcaaccgacaaaggttaacataagacatacacttgttcttaaagacaaaaaccttttaagatataaaagtgtttaatatggataaaagtctgaaaaataagatataaaagtgcttaatatggataaaagtccgagagataagagtggtcgacataagtcaacagtt

SEQ ID NO: 28054 - DNA, 694 bp, Arabidopsis thaliana columbia
cacctcactcgcggtgccttgcggctcaagttaccaaccttggagccgaagtcagctgagtcttggagacgaatcagctgagtcttggagccgaagttgatgggtggtggagtgacactcgttgccacctgtcaccacgctgtcgttcgagacacctgtcgcctgtggcgcggcactgtccggacttgtggcagcgggcggtaatgcatggccaaccttgggcggattataaatagagctctctccgcctagtttcatttttgaaggcaagagagagagactaaaaggctgtccgattaaaaactcgaccgaaactaagaaaaacttgcctgaatcgataaaaccttgcacatggtcgaggaaacattgtttcagactagagatattttacgttgcttctgcaaaataacttgtttcagactagagatattttacgttgcttctgcaataggatattttacgttgcttctgaaaaattacttgttattatgtaaattttaacaaggattcgatataatgatatatttttgggtaactctttgcaaagtataagctaaatactatgtataaagtgttttcatacaagcaaccgagtgtttaatgatataagacctagtctgggtttctcaacactagaatatcaggagggttggcaagtgtaagtggtgttcctagtgggaagagggtcgatttt

SEQ ID NO: 28055 - DNA, 534 bp, Arabidopsis thaliana columbia
  unsure (1)..(534): unsure at all n locations
ggaagagattgggtatcagtggacaaaaatgtttgtaacctttatcactcagaaagataacaacaaataaataaataaaaagcaaacaaatataaattatataggttcacatgaaaatatatgataaaaaaggtggcggaatgcgtttcacagagagtttatctccacaaagaaaattttaattaaacagataaatatagggttcgtctttatcttcatcatgcatgggaaccatcgtcatccatatatatataaaaacgaccanaaatgaaatattatagttttcgaccttccaagaataatatatcttaaagatcgtggaaaagattactcatgagtcatgaccgtctctttttaaaaacacttagttcatatatatggttctattatggcgtttcttgagctaaatcccaatgaaggattagcgtatgctcgaaaaggcgtccagaaaatctttggatttcagttgcatacttgcttgtgaaactcattgtatttgtttttgttttttgttcaaaaattgattctttgttt

SEQ ID NO: 28056 - DNA, 535 bp, Arabidopsis thaliana columbia
ccctccatactctcgaatggctgctaatctatggaatccgtcgcttgtgtaaatgtcgcatcaaacatataactgaattgtatttgaattacatgcataaccacaataattcatgtgttttaacattatcgtagacgtcatgcgcgacgtgtcgtttatctggtggatgcttagtggttatcttatgttatatttatacgaaacaagttgtttttggaattgttttcaccccttcccccaatgcaacattggaacccgtttataacactttcgccgcatttaatgcaatagatacgtatcaaatatttttctacgggtagatttacattgtcaaatcgcaaataagatttggcgaccatattatgtagcaagttgcatactaatgattactgatatagcgaaacattgcatgtaatgtatgatctctataagttgatactttgtcgagtatattgcccaatacacaatttccaactcacgcccattgttttcataccgcgtctgcatataggaattacatgtgttgtttttaaat

SEQ ID NO: 28057 - DNA, 573 bp, Arabidopsis thaliana columbia
catttctactctggctattctccctatctgcagcgaccaacatcctgacccgtttcgtggaaacgttctacaagtctcgcgaggagattgaaagacaagccgaggctgagaaggagatactggagaaaagaaaaatgaacatcaaacaaaatgggaacctctaaagaaccgtagctagtttcatcgacaacttctatgctgcttagatggaactgcaaactatctatcatctcttctctagtgcttatgtactagaaaatatttgaacttttttacaattcgaagttttaccttatcttcattgttctaataaaactatctgttcgtttttttttacctgcctacgcatccgtaccaaacattttacaaacaaaaatctctgtgacaatcccaaagattggctcgtctgaaccctaaataatatctgatgacaaaaaaaaaaaaaaaaactgtgataatgtcaaatgaagcaaacatgtaaaaactagcatgaggaaaagctttatcaatgttaatcaacctaatgaattgttatctagtaattagaagtgatattacctgaagttatgcctc

SEQ ID NO: 28058 - DNA, 394 bp, Arabidopsis thaliana columbia
gtttacagtttgagatctttgcgtaaaaggtacaacattaactgtcaataatagaaaagcagagcatattctcctctcatatttatggggggagtatttaattcaaattaatcttatacactgcaggctatgttagtgatcggacaattgtaaagcggtgctatgaaattatttttactagctttaccagcgcccacgtcagctgaaagaattcatcttccttttcccctcacgcacgtctaagcaatcacacaacgttgtgttagggattgtgttgtaacttcacaccacagatgcgttactctctgcattctacaacttatggtgctacttatttaaattctttcgagattttagttatttagttaattcacccgtgttttaaactaatata

SEQ ID NO: 28059 - DNA, 571 bp, Arabidopsis thaliana columbia
catgtgtgcagtcttgccatgttaatttgctcaatccggttagactaaggctgagcaatttcatccaccatagctttactatcaccagctctatgcagactgtttattcatgaaactgataaaaatccggctacactataggtttactatcaccagctctatgcagactgtttatccatgaacacaaaagattcactacttgagagagacataagaaacaaaataagagagcttgaacaaagaaaacaatcatgggacatgactcatccaaaacgatcatttatggcaaagtaatcatactttgacatagattcattctactcagtagtggtgcctaagatttgctttggagatcaattagaagacctagaaaacaacatttattttttcaaaagcagaaaccatatgaaaccaagaggacttttacaggtagctaacctcttcttgaaacctctggagcatgagccgcttctgctcaagatcagtggcgtaaggatctaactgaccatgtcccagaatcggtgatgcccatgtttgcctttctcctcttctgcagggtaatgtgcattat

SEQ ID NO: 28060 - DNA, 450 bp, Arabidopsis thaliana columbia
gttcagcttgttttgagttcttaattattgtcttttgacgtggttgtgtttttttgtgtgtgtagtggtcttgctgctgagggggttacgtggagactgaaggtctagagaagacacggcgatagagttagacagatattgccaacgaagtagatatattaagttcaagaaaccaatatgacatagtgctcccaggtatatatgctcaatagctttttctgaaagacaatcatatcttagctatgtaaaattttaagtttggttagtctgtgggagaaatatcctcattgcagtttgtgcttctagttcattttactgacagcggtgaacatatgtagattttggcccgtacaaacttgattttactgcaagtggtcggcatatgttagctggtggtcgcaaaggtcaccttgctcttttagacatgatgaatatgagcttaattgaaga

SEQ ID NO: 28061 - DNA, 565 bp, Arabidopsis thaliana columbia
ctgttcatctctatctccttcctgtatgtatgtatacttctataccttaagaaccgaactgactcaaacatggagacataagagattcaattaacaatttgaacaaagcttttacattcgtgtttaaggtacattctgtcttaaaccccaacctgattatcacttcttcattaaaacctgcttctggaaaaaatctttgagccataagggcatatgatacatgactgccatgagggttgaatacctgcctgacgagaaccaagcgggtggattcttcttcagcactgcggctacagtgtctctggcaaatgtttctgcaggagttggattcatcctctgtgatataaacgccctttctctgatagcttcttcataaggcttgtatagtttcagctcaggcattttgttgaaagttgccacagctgagtttgctatgtttgttcttattcctcccgggacaacattgatgacatcaatcccaaacggacgaagctccaacctgacgttaagcaaggaacattacaaaacaattgacaaccaaaaccatccggtgctggataatttg

SEQ ID NO: 28062 - DNA, 882 bp, Arabidopsis thaliana columbia
ctcacatcagtcattgtagaaaaactttccacactcagactataattacaagaaacacaagtaacaaagcaacaacatctaggagaaaaatgtaaccaggacctcctccttaccatgaataccaatacttgctactaattagtttatttttgttcagattcatcatctctgtgcgatatcaatttgttcttgtactttgattgggtttattatagccgtcgttggcactgagactatcacaagtaaaaaggtaaaatttgtttctactcttatgctatagtcactgttacacagctaaacaatggagaaagacatagaattctgaacagattacgaaatacggcgagagaaaggattcaggtctcaccggcggaggcggaggaagtcggtcctttggagccagaggtacgccggagcttatgaagacgtacctgcatctccgtgaacagttgcatcctatggcattccaattccttagcgaatctcattctctgcttctccaattcaaccatttccttcctcttcttctcctcgactctctcgtatatctgtccaagcctctcaattgcgtcggcaacttccttgtagccttgcttcttctcaattttcctctcccgcttcttgttactcccgctacgaccgctcgatctagaccttgaaccttccgagtcatcttcagacgccggacacgccgccgccgctgcggtgccagcgaatgcgttgagattcccgcgaaatccgagtaaatcgtcaccggcgtgaggtataatcgccggcgatgtcgcggacgtctggggatcgcgatcgtggacaaccggaactggattaatggacatcggaagtgatacctctggtgcgggatgttatcagttgaatcaggat

SEQ ID NO: 28063 - DNA, 576 bp, Arabidopsis thaliana columbia
  unsure (1)..(576): unsure at all n locations
tagtaacgttcgccagtgtgcaaaaatgtatatgtagataaatctattttaacataatttttcttttatttatatatttagtattattaattttatataaaaaaattaaaacataagacaaatatgatgtgttattttcccttacttgtattttattgttcaaattttttctattaataaagctatttaaaaatattttgactaattattagaaataaaactgccaaaatatgtacatgtttagcatatctattagtaaaaaagtttttctattaatcaaacaattatagagaaatataatttgactaaaaatccgggttgacacttcccatttatacccttgatctgagttttttgtgataatttcatagatttgttggttctgggaaataacttctaaaaagttgtatgtgtcatatgctgcaaaaatctaatcgtgaatggtgaattctaaacaaagacgtaaaattttaaggaaaacataaatcttaccgtgaaactttgagtcagtcgagataccatatatattagaaaaatanaagacatatataaagagaattgtggttgttaatgaga

SEQ ID NO: 28064 - DNA, 519 bp, Arabidopsis thaliana columbia
ccaccaattatatttaaaaagtaagaacaaaaatatgttatttgttttttttttagattcatcataaaagtaagattatcgatctattagggtggaaagctcattggattcattaaccaaccaataatgattccttgatcgagttagatacccacaactgatagttaaatgtagacataaaactgttgataaaaaaatgtagacatagaattaaataaaatttgaatttaactattatgaaaatatgtaatatcaacattcaacatatgcatacaatataaggaaaatttaataaatcttgaatttaatcaaaatcataaagtgatgaataataaatatctcatcgaaaatcatataaaccaaacaaccaacattatgattttgaaaagtgcctagacattttgctccttgtaatttattttaacttgcaaaagccgaggaatcaaaagacaggacatgactgacaagtttgtctagatacttggaagaagacccatcttcacttaagcaaacattagc

SEQ ID NO: 28065 - DNA, 603 bp, Arabidopsis thaliana columbia
tgcgtgcagttacttactttcgatctccttcaacatcaggaaggtcctttgtaatagcaatgaccagtgcaaacagtgtcacaaaagatgtgatgaacgccacaggtgcactgcaaatagcgaatcaaaagttgagtaatatatctactcacgattatggggagctcctacagttcctctctcattgtgagtacaaagtttgactaatttgctgaaatcaaacaacaattggtccctcacatatattaaaactctatccatacaagtatgcaaagtccatcctattattacgacctgtttattaagttttgtgcatttgactaccaacctccactgaaatggaagtccaagagcagctcttgtagcatggtacacaccaaagttaagaaggaaacctcgtacctgataagaaatgtcaatacagaattatgttattaaaagttcccaagccacgaaaaatatcacataaggtgatagttgtatattgattaagaagcataaaacagcatttaccgtggcaataataagaaatgctgcaactgggaatcttttcattctgaggggtggacagaatagatggttccagaaaaaggcaagagagta

SEQ ID NO: 28066 - DNA, 582 bp, Arabidopsis thaliana columbia
ctctccgtatatacgaattacgagtcacttcaacggtggaaactctttcgtttttctaactctttgttgacgtgttaataaggacaaaacccctaagtcgactttatctgaccccaaaacaggaccggaccaatttagagggagtcagactgagccaaaccaaacatcttctaatcccgaaatgcgacatcaaagggaccgggctggaccaatcgacaagtcttatccactcagggctctgcttgcagtccaaaacaagaaatgtctacattacatattgttgaattcaagtcactttcaagcaaaatattttcctaattataaaaatctaaacaaaaccagaaacactggaaagtttttgatttgaagacaactatacataatgaaagcaagaatgaaatttattcaaacacgataaggaatggaactagttagtacctaataagacaatgacaatggaccgtgacgcagtcccgtctagcaaatgatgtgttacatatgactaaatgtgcaatcgagaaactgttgtgagtcactccacataaatggggtatatgaaaggattttctataaggagatatt

SEQ ID NO: 28067 - DNA, 297 bp, Arabidopsis thaliana columbia
taaatcttagagttagatttatttacaactcaatgccattaacattaaattttttttccaaaataattaattttacattaaatttttaatttaaattgtcaatcacattatcaatcaaatttaatccaaacaaacttcacatcaatcccttaaaattagcataaacttcacattaattatttagacatgaaaatatttatttaaagatttaaatcttctaaatttttgcttttagagttattatatcattacctaaaaggcaaaaaatattaattttttaaatattattatttatat

SEQ ID NO: 28068 - DNA, 411 bp, Arabidopsis thaliana columbia
catccttttcatgaatcctctcatatgcatagcatcagaagtgaaagctaacgtccaacatctaatgtgcatgtgttaaaaatttagataccacaagcagaagaagcccaccgcagcttaccagcctcttttcatcagctgtgcagccacagaagatactttctgacagcacatattcctcggatgaactagcatgctgcatgacatagccaaagcagaaggccagaagctgcagaaagatttcaccatattacttaaagctgcaggctgcaatcagcaccactgaaggtgagatttatgaagagctcatgaaagtgttttaacggtaaacaagtatagaatctgacatgctatgaaaacagaatcgtttatcctctgtggtgctgattccaaaaaattgttttttgatcc

SEQ ID NO: 28069 - DNA, 1042 bp, Arabidopsis thaliana columbia
tacctaaactatttaaaactaagcgttgtgattgtcaagacatgcttggacattcaagggctggcatttctgcacatgttacagtggtcgtcctggttgctaagtttcactaatagctataaaataaaaatctatttactaatacctataagagaaataacaagaatttcaagtgttttggtgttgatctaacatatgatatatatagccttctgtttcttagttatttttttactctgataaagtagaaaaaatcatgagttaatattctaaaagtagtatatacgcgcatctcaataaatccattttttctttcattctttgggttaacttgatgtatagtgctggataataacaaaagaaaaaaaaactttaagtattttaccatctcataattagtaattctttattccattatataactaattatatcttataagttttgtgacattattgagagagtgttttagtgttgttgacgacaaactctatttttattttgtgtgttggtgtaggaattagcatcttcgacaacaccaacttaaatcgaaggaagtacaaattaaactgagaattcaactattctggagtatccaagttaaacatgttaatgggccaaaataaggagatcgccagacgattttggtgaaaacaaggaagtcgccatacgatctcgatccaaattaggaagatcgcccaaccgacttcccaatttgaggaaaaagaagctttcctttttgataaaggagaatggtgaaaagaatggaatatataaaatttaggaggggttattggtttatagatttataaggaattggaaatccaaacaaaaataatttgttattcaatcattgattttaaaattctaattaaaatcatgttattgatttgatgatttataaatactagttaaaattctttattattcgtttagtcatttgtttttggatttgagaatcaaattatgttttaaatggaattgaatggatatgaaagagaaaaatagaaggactcaaatccatgggtaaacacatgttatttt

SEQ ID NO: 28070 - DNA, 687 bp, Arabidopsis thaliana columbia
taaacaaacaccataaaaaagaaaacttgataattttcaatacgctacagtgacttcaatttcaagccaaacaaattacaagaaaacataaaaaaaacaatttcataaatgcaaccacacacacacatgttcctccagtatattaggaaaccaaaacgatcaaccaggaatagagcgaaccacttgtttatgcatatatgtatgaagaaagaagaagcaacaacctgaatatacatggcaatgatacatataaacctaaaaggggattttccaaaaagttgttttttgatcctctgttttttactctatgaaaacagaatcgtttataatgatgaaacattgccagcatacaaattcacaaaatttggtgttttgacatacaattgatatcaaaataacccaaaaactctattagaatcaattgtatgtgaaaaaaaaactgaactttgatcagattcatagaagaaacaaaaaagtaaataataacaacaggagctagcaacatgtatactatttcactttttttagagtttctaagccaatcagaaggctctatttcacacccactcgcacaaagtgagcgttgacgcgtgagagcaattctgtgggtgtaccctttccaaatcatgcctttttcaatctactcactagtctccaaaattctatttcgcgtgaaaatttgtttgt

SEQ ID NO: 28071 - DNA, 546 bp, Arabidopsis thaliana columbia
ctaagttgggtggattagtcacttagagctcaagattcatgtctgattgaaatcccagcaatcagtaaaaccaaagcaagtaaattctcatctaaagctagtttggtgcattggcacacttaaaagactaaacaaacgatatcgcaaagctcaacattcatgtctaactgaaaccgtagtatcctaagaacatattcgaagcttgtgtgcaagaatctataaaaggggatggattgaactcaatattaaatctctaattccattccaccacctaccaaaaacagtattagatatcacaaaacagtaacttacaatgttgccattgttagagtttagaatcaactataatgtgtagaacaaacaacacaaaacattgcttatagagttcgctaacatcttctacaacttcatattaaataatcctattttccatggtgatgatttcaatgtttccatcaataaaccacatatcccaattttgttaaccctttcaaagactgccaaaatcgaccagataacacacagtagatttccaatttggaataa

SEQ ID NO: 28072 - DNA, 447 bp, Arabidopsis thaliana columbia
ggaaagtgtttacaccaaaagaaaaacaaatacaagatggttcagcaacaaataacagagattaacaacatctcgaggaaacaacaaggaagagaccataaatcaatagcgggttttttcaagcagatttagcagcttcagctgcttcttctgcagcttcttcttcttgaagtttcttcagagacggaggtggtcttggtactatgcttttcttccattgtctgtcaagtttcctcgacaaccttttctttatcccttctttgatctccctctctcttttaaccgtcaacatccgagcaacctaaatcacccacaaccaaaagatcacatcttcagtaccagaaaagagacggacgtaagccaaaaaaaccaagaaatctctacttgaatttagtgtcatctccagctaagttgggtggattagtcacttagagctcaagattcatg

SEQ ID NO: 28073 - DNA, 711 bp, Arabidopsis thaliana columbia
caccctgagaagaagattgcggttaagacatacgttagatgctcttacagttaaataatattagacaggtcaaagattttataccaagatatatgtctgggaattcgagacctagtttggacagaggttctgcaacttcaacctgcataatgatagtgaatgtttaatcagctcaaagcaagccacccatctatcaagaattatacaactcttggttcaaacaatgatgtttgcatgaaaactggcaaattgtttgtttaatcagctcaaagcaagccatggcgaaagaaaaggcgagatggaaagcaaaacatacatctgttaaagatgtcatcaagcgcctcgacgaatattctatgagtgaacctccacccaatttagtaagttccgtcagacattcccactctttctcgagctcctcagtgtttgtagcagcaagaacaatcacattgcggcacttaatctacaccaaatgaccaacgatcagatgggtatggaaataatgctgaaacgttatttactttgaatggagttctgagagcacataccaatggcacagaaagcttttcatgatgcagtagttctgtaattccttccggtaactgagccatctgaaatgagaaaagcaaccaacttggtgaggaacattctggatattacgcaaatcataagcatgaagttggcccacatatatacagaaatatatagttt

SEQ ID NO: 28074 - DNA, 480 bp, Arabidopsis thaliana columbia
tgttaatcaatgaaatgtcatttcaactttgaagtggttaatgatgaattcaaaaaacaattatcatttttttttacagttcagaaatttgaataatgataatttagcagttaaattttagaattagtcaatccaccgactaacctgaccgaaaattagaagccagcaatttaagaagacgtgtaaatatatttatttttttttgacagcaagacgtgtaaataaattaagagatggaaaacaagtagtactattaaattttagtaaattctaaaatatgatgcatattatatatttagatataaataacatttctgttaatctgatgacaaaaaaaaataaaaaatatgttgattgtaaaattaatttggatttgtaatagtttacgaatttacgatgaaaatacatatgataatatcataatatacataattaccatcttcaataattacttcataatgatggaattaaatattgata

SEQ ID NO: 28075 - DNA, 483 bp, Arabidopsis thaliana columbia
ttcgttttcaatttgaaaattgtcctcgtggactgttccataaccaaattctattgactatgcagtaattgatctttgaattaaaaggatcaacccactgattatactccaattgaataaatattcttctttaatgttgtttataatctcttaagcaagctctaatgatgtatttttgaagcaaactctaatgcttttatggtcagtatatttattctcttaagttttataactaaattaccatttttttttgccaaagcagacaacaaaatagcgaagtgcgttccaaaagttagcgttttcgtctccgtccccaaatctctcagctaccttaaatcagaattctagggttcttccgattagggtaaaatcgaatccagatttcccaaaattctgatctttgatttataaaagatgtctcacaacgggaagataatcccaaatctggaccaaaacagtacgaggctctcaatctcacagttc

SEQ ID NO: 28076 - DNA, 440 bp, Arabidopsis thaliana columbia
cttgccttttcagttctgtggaagatccttatgaattcagtttgtattgagaatatcataaaagattgcaggtttcttggtaactggagccagttcctgaaataccaaaatcgattcaagttacagagtccgctcttactatttaccgcctcttaccgcactagtttctacttgatcttttgaaaacgtatcagagagagaaaaagagagagtacctcgactgcggcactaaaccaaggacggtagcttcggcccaaggtcttcccattatttgtaatcctataggaagcccctctttatcataaccaacctgcgttgatttttgtttgccaataagttagaaaaagagagtgattaatcagaaagaagatacgattatattgcaagaatgaaataagtaacatgattgtctaagctttggttagagacggttaaaaaaa

SEQ ID NO: 28077 - DNA, 1622 bp, Arabidopsis thaliana columbia
ctttcttagcagcaaatctattaaaaaatttaagctttaccttaccaagattccaaatcattcattcagagctgctcctaatgattagcttgtcttctcaaagatgctctttatcctttttgagattcggatggatttgagtacagtatttaatatatgtacctgggctattggggcataaaaataggcccatgtatatatgggctttcaatattaaaacccatctttactctgatcacatatccaatagaaattttgtaaaacttaaatgtgactgggcataaatttggcattggccttcaactatagggaacctaagatcttcactgacgacatccatcaactcagtcatatttctacaacattataagtccattacaacattctcaactcggaaataaatgctcttttggctttcataatcgatcttgccatctaaaacaatcggattcactaaactattttcgattaaaagagccacttcaaaacttggatatgaaatacacatgaaaaatatttagttgctactacttcaattcgatattttgtacaagattaaaaacaaagacaaaaaaaacagttctcattttatttcatttgatgtatacattattaggagttttatccctatattataacattaactctggatctttattctacaacttcttgtccttaaggttattcaaccaattttttttttttcatcaggttattcaaccaatttttaacactcgaataggctaaaaaggggaagaccaaaagatttcctttttactagccgttataggtaaaaaataccgttcccgtactttaacgcgcgattcacgacgttattcacgccgtccaagacaaatcagcacatgtggcgcagtcgccccatccctgacacaactcatacgtgtgagcgagctctctcattggtccaatccgttactaaaagctgatgtgtctctctataattggcaatctaccaaaaaggagtcaccatgtgcacgttagagtatgatgcgccacgtaataaaacgacaggatttagttttaaaaaattaagaattagggttaatgtttttgagtggcgtggtccaccggaacacggtcaagcctcagccattcgttagtcagagcgggttaaaagaagccatttaggtaacgccacgtgttattctttcctctcccgcgtttagtctccttagatctgaccgttaacttcaacagtcgtgttctctcacctcccatatctagccgttgagcccataactgtacatttctctctctctcctcttctctgtttctctctcttcttcttgcagttttggtttggaagaaagagaacgaagaagacgacatctccagagtttttggcaataatcttttaagaaatgggaaagcttttgtgtgattcaacggcgacatttcaatctccttcaccaacggttccttggagagaaccttctacagtcgccgtgtctctcgaagatgtagatcttgttgaccgactccgcggctgctgcggcggtggacgcggttgagaagacaatggccgccgcaactaccaccgcttgggatgaggtttttggattggaggaggcgcaaagacggcatctgagccggtacacgcg

SEQ ID NO: 28078 - DNA, 490 bp, Arabidopsis thaliana columbia
aggaaaagtcataagactttttcctgcattacctttttcttctctcaacattgaaccaattcgaagggtttagagtttattattatcaagtttcaacaaagagagtgttcaaagttttttttttttaaatatcctatcggctgatccggtcagttttggtaggaacgcaccaaggtgctacagagtgaatttccccgattcaagtagaattgggccaccacactgcctgatccgagtttgagagagttgagaaaacatcgtcttctcggttaaacaatgttgttttgtaaggttgggtggaaattaaagaattgattactgtaagagtcaaagatttattaagaaagaaagaaacagaagatatagttttatttatcatagtcgatactacattctttagtactatcatgaaaagcttattttacagatttaaatacttcctaggaacaagtacaagctcatttttcttgctggcattgagtccaggaga

SEQ ID NO: 28079 - DNA, 150 bp, Arabidopsis thaliana columbia
ttcttatttggaaagaagtgcagtccattgtagctgtaccctctgtctttgcatctttgatttctccagctcggagcatccccagacaagatggcctcatccctggtaaaaagttccctggccgagagatcaacgtgaatttcccatcct

SEQ ID NO: 28080 - DNA, 306 bp, Arabidopsis thaliana columbia
agggcctttttttcccaatggaccaatagataattaaattatttgaattaaatatatgaaaaattttttttttttttttaaacaatgtcgggcacgtgcctaaccttattttgatgtgggtccgctcctgattggcctgtatctttatggtacaactccatgaaatcttaaagctctaattttgaagcaatctagctttagctttcctaaaaaatctcaccgcccagtacaactggtattagcttttttagctgtaactcttaaaatttctacaacagatttatgtgtgcgtaaagagctgtagac

SEQ ID NO: 28081 - DNA, 981 bp, Arabidopsis thaliana columbia
cctctgtgcaatgacaacattggctggagtccacaggaaaacaagtacaatccaaagtatcttctgacatcacttttagagcatcttcaaaaaggaatgaccagaaattctctggaactacaactcttttggcccctggtgcttgctctggcatcagctcaccatgattgcacgtaatagcatttgtgggccccgcatctgcttcagtaggagcatcaagatttttcctttttatccattgctgtaacctggaaacatgctattacgttttagaagcagctaattgtggaaacaccccacaaaataatagtaattaagtgctccataaaataaagcgccatctgcatatgcatcaaacttacaaaagacttgaacacataccatgctctagagatataatacattccgtcctcgcactttcccgaaagaacatcatttgctatgcttttcatgaatgttcttcgatccctataactgtcagaagacacaaccatgcgagcaccatccataaggcagtccctgcagtagtcccctttccctaactttggtccgccattgaactatacatacgataaaattattccatcagaaataataacatagcataagaaaaatgttgatagtcgaacagaagtctgtctactggaatctagaaactataattttttctgacaaatagttaatgatggcagctgatgcaaacttgaaatcaataaagtttccgcccctttaaagtattgatacttacacatgagctacactaagtacattgcatacctttgattctaacttgatccatgcaagttcagatatccgcttcatgcaattcacttttgaggcatgaactttcccatgggaacacagtaaaggggtgttgtccaaagcgctacaccatacaagaacaaatataatcaagaacacttgaaagatgtaatctgatttgctaaacagaaaatcatatttaccactaccagttagagc

SEQ ID NO: 28082 - DNA, 322 bp, Arabidopsis thaliana columbia
cagatatccccttattctctttttcttctacatattattcaacagaagtattattcaaaaagatattttaataagaatttcatatagtacgacgtagtttagttaatttgaattatgttttgggacttctaatataaaaattttgtttgaatttctctcttgtgactttcttagtttttcttcttaataacaaaaaaagtacgatgaaaagtccggaagagcattggctgcgtttctttgaactttgacccaatgtggacgtttcaatagccgcctatttggctaactttagcacttttgagttttaaatgctttcttaagc

SEQ ID NO: 28083 - DNA, 482 bp, Arabidopsis thaliana columbia
gtgttaagagagtttaaagtgtcaaataaaacaaagagacaaaaaaggactagtgggaggagcaaatcgaagaagacatatgttgtcttcttgatttagtttgaaaaccctagcacaccattcattttttggttaatcaggaaaatattcatccctttagtacacaaacctatctttatttgaaaagcgttacttatcaattagtaagagtagcaattttttctaagctacgatccaaaagttccagaaatttttagataattcttctctaataattcaagcgatccaagtagaaccatagctgaagaatagcacccaaataaaataattcttagaccacacacctaccttctactttaaaaatttatgttgtttaaatatacgaataatgacgagacattaccccctcttagtttagctttatttgcttttaaattcagaagcaataactataagttttaagggccaattattaatacaga

SEQ ID NO: 28084 - DNA, 545 bp, Arabidopsis thaliana columbia
catgttgtaaattgtttcaaaaggttgaattttatcatcaaaaatacaattagcatgaatttctatatttttaatgatgcgacgaagaatattttaatgttcaccacatatctttcatctgtattctttatttctaatgtaaacttttattaacgttttatcaatgactcaaaagaaatcaaatttgtcaaactttaatactagttgttatcgaaggtttttagttaaaagaatatctcacatgtcaattatatgtagtgccgtttttatcttgatgcatttttttattaatatgtcagtttgttttactattattaactgactaatcaaacacagaatgcaaaaggaatctaataattgagaattttaattagaattgaaatcatataatttccatgatctattatatttgactaaagacaaagggtatcatcacaagacatgtaaactgagagcacgtgggtttcgtctagacgacggataaactgacgtttttggaaatacctggattcgattgtggatttcatctcttcgatacacacatg

SEQ ID NO: 28085 - DNA, 468 bp, Arabidopsis thaliana columbia
  unsure (1)..(468): unsure at all n locations
taaaaacatgattctctgaagactgcaatggtccaacatgtgaccacaacgtgtaataagtgatacatagtacaataggttattacgcaaacctttcataacctatcatataagtcagtgatgtcacccattaacgcggtaactaatcaaaaaagtcaactaatatgaatcgtatgattaaaaagttttagtttgatctttctctcttgacttttgtttgttatgtcgtttagtaaaactcactctctacttttgtttgttttgtcgttttttctttattgtttctggagtttggctggttcctttacgagactacattgtgttctatgggaactgctcgtacgtaaatcatgattctctgcaatggtccaacatgtgaccacaaattaaagtaccaaaagtaattactaaactgggtaacaaaccggaattaattattgagatggtttagagtanaggatagtgagg

SEQ ID NO: 28086 - DNA, 731 bp, Arabidopsis thaliana columbia
ctcgctaaaacccaatgttatatttgtttgaattattcaaatttagacgactaaacacagttccaatggctaatgccacttctttcattgccctcgcttatcttcttgcatctggttcgaactctttcttcttccttaaaatcttatgttttctctgtgcatgtgtctgagcgattgataattaaatgtccatgattgttttatagatatttatatgtccatgattgtttgtttcagtttacattatattgtttgcatatacattttagtgtttacctttaccacttccaaatgaaaactgaatttttttttatttattttttaatttcaaatgatttttttttcttttgctattgttgaatctcatataatcgcaaacacatatatcgtagttaaaacaattgagatttaggcttctctatcatttattattcaactagacgcctttcaaatcttaaaactgacgtcaaacacttttttgttttgtttctttctttggcaaatgggagagaagcgttaatgactacggtggtgcttgggaatcggcaatgtgtacaagccatggattgcacaaacgtttgttcacacggtggtctctgcaccaaaaacggtaagtgtgtttgttggcaccaaacgtagtggtcaacagcggacctccgtgctggtcggatgaaatgtgctttagtacatgtggtggaaatggtggttattgtactatgatattggaggat

SEQ ID NO: 28087 - DNA, 579 bp, Arabidopsis thaliana columbia
gctgtccagccacgaaatcacccatgtcagcttgctgttgcctcctaatgtttccttaattgaaacggatgccatggttggcctaaatatccataatttgtggtttggaagtgtccccatgctgttatgtctggtctagcaacatacgcttaaagacaaaagtgaacgatggagcgaacagatcactcttggcttctctaaggcgatggagcgaacagatcactcttggcttctctaaggaatttcagttgagacacaaacacttagaaatatgaatttatacgaactaagattgactcaaccgaactcaacactcacgagtcgaaattcttgagaccaatctaaattacagagtcgtacctcctctgtttctacatggatatttgatgtatcaacaactacggtacacggaactgaagactcatcaccaactagaagcaaacatgccttataaattccgatccctggtggcaaattaagtattgatgatctcgggactgagatcatcctttcacttggcatatcttgggttctgactctcaagataagacgatgtgccctgcaaggagctctgatacg

SEQ ID NO: 28088 - DNA, 475 bp, Arabidopsis thaliana columbia
ggatgctctgttttgctttgtttggttctgtattctcattattgtctgtatcatcttatttacaacaagagaaagatatttcgatttatgatcctaaatgcttgatttaatacctatccgaaaacattggatttaatcacagaagaaaaagagaatcaaaggagttgactctgcatacattaggcaaagatgaatgatgttaaacaaaggcattgcaaagccaattccgtttatagaaccaatgcatttggatagaaacacaagcaacatttattcttccactatataacttaatacattttggagccatactaacataagaagcaaacttatgttgtaaacaaagcatataaagatcagtcattgctcggaacaagagttagtcattcatttaccatgttcaagcaagccggtgcccttaaatttctcttccattaacccatctatacgagcagccatctccggagtcagatag

SEQ ID NO: 28089 - DNA, 526 bp, Arabidopsis thaliana columbia
tcgatcgacaggagaggatcccctgagagtttatgccgccttagatatcgtgagaagcgggcaggagagtttagtctatttccctctaagaattgctcaatcaatctgtaaaattcaatgtttctttgaatcaaaacgtcaagcaaagcagaggaaaagataatgccgttttctaattctagctacttacaaattgcagattgacttttgcgacgtgctacttcgcggtcaggaaaagaatcctctagccttaagcttaaccatacgtacagatccaaaacctgctcaatcgtcatctagttaaactaacaaaatccacattttctctcttgaatttggttaatgaacaattaagatcataatgagattaaacccatctattgcaatatgagcttcgaagattctgttttatcacgagtttctgaataaaatacatacacttcctttgatcactactcatagaggaaaagaaagatgttaccttgtgaatggattcaagttccttgagttctgtaggtgttttggg

SEQ ID NO: 28090 - DNA, 260 bp, Arabidopsis thaliana columbia
tatccgtaatattaatttaaaataatattaatatgtaatctaaacacatgaataatgacaattgttagatagataaatttattttatgatttctagaaaaagtcaaatataataacatattaactactaaattaattttttaaacaatgatggatctaatttattataataaaatcagaacaagtaacatgcatcgcacatcacataacattaattatcacatatgatataatattactttatcaatataatactaatta

SEQ ID NO: 28091 - DNA, 596 bp, Arabidopsis thaliana columbia
tgaagtatcttttgattcgctgacagatatcagccacatatctgatatctgtttcttccggttcacggcagttgtaattcaattttgatttttgaactataaaccaaagttatatagcttgtgattcacaaaaacaaaaaacaaaacagaaatcaattaaaaaaataaatagaaaaccgctgtcgattattatataaccaccgacgaacgaaagagacgagagagtttcttttgtaaccgtaattgtaattaaagagaagaaataatggagaagctgtcatcagctgctgtagttcctcagctcctccgcaacatcatcgtcgccgtcgttgttttcgctgatgaatctctccttcaaatctccgggaattcaaagctcctcgagaaactccgtgtatttctcgtcacgtgtttcctcttcttcttacgctctcttccttcaatcgtctctttcgcaaaccctaattcgtcagtcgtctctttcgccaacccttattcatcgaagacgaagaagaagaataagatactggtgatcaccattgcgaagaatcgggaatcggtcgagcaatttggcagttattgtcacgatgaatgaa

SEQ ID NO: 28092 - DNA, 571 bp, Arabidopsis thaliana columbia
tgaaagattaaccagtaattgacttttactcaggtaattaaggttttggagcttaccatcatatcaggcagcggcatctttaatatctttaagttaactatcgtgttattggctctcttaaggtcaatctggaagaccataagacaaacaaatctccaaaatgaattcacaaaagtatacagacatgcaataggcttcggagtagaagaaagtctaagggaaagagatgctggagagtagcttagtacaacttaaaaaacaaaatattttacagtttccaccagaaagtaatactacttgtttatagctacatgacaaaagtctccaccagaaaagagcaagttaaaatatctgacaataaccaactgtgttgggaatatttcacattacctaccagtggaactttttcaggttttggttttggtcttggttttgcccaacagagaaaagggtctctatttctggtacatcaagttctattgcactagcaacaacaacaaaaaaaaaagcaatggttgataaaagaaaactcagtatcacagaattgaattacatggattggtcaataaag

SEQ ID NO: 28093 - DNA, 545 bp, Arabidopsis thaliana columbia
ctctaatcaataaaaacatattccactaatatgtatttatagacttacactattttttttttgtgaccaatcttttataaaactatccatcaaaagataacttgattacaagagctggaataaacatcagccaaaagaaagaaattgcagaaattactgccattagagcatctacattgaacaaataaggagagtgtcttcttacacttaaaatataatatattccaaaaaatattatattaaataaaggatgtctttaaaataaagacacaatatcttaaatgtctaagaatagacatttttgagaggatatgatatctccaatttaaagatccttcatatttgaatattaatattttgtcaatctcatgttttcctattatcccccacatcctctttctattgtgcaatgaagctgctcttaaggtcaaacaataaacataagaaccagagaataaaagaacaatcctaacactcaaaaccataaaagatatcgagtgtaacgatgtccttggaacacagacactaagcgtgatctattgtac

SEQ ID NO: 28094 - DNA, 1295 bp, Arabidopsis thaliana columbia
tcgtgagaaattatattggcggaagagagaagattaattactcaattttcatgcatagatacttaatattctgatcatctaggcataaatattaatatagcccataaataattaaatcattttagctatattaaatgtgttttagagaagaaaaaaaaaaaaacctctctcctccaacttacccctcttctcttctttcagaaaggaaggatatggcgtagtttcttttggttccggtgtaatctggatcgtatatattctcgttttcgagatcaataaattccgatttactgtcggatctttataccggttaaatccgcttttttctctcgcttttagcgggattcgatctccctccatcctcggtttttaaccgattcaccggtttcccttcaaagatttcgccaatttctccgaattgattgaggattaacatcttcaacgcgctcttttgctctaaacgagagatcaacgttggattcagatctacatcaagatgggagtagtcggtggtggagcttccccggagttggtgttttacagaaactttttgaagttgtgattgtctctcaatccgagagattcgatgtccttttgggttggattcgaggtcggcagaagacaagcggatactcatcgctgcatgactcattggcggcggctaatcgaagtttcagcgatgtccggcgagtttgacggcgatgcgacaatcctcgccacgtagttaggcgaagacacatcctatacacgtgtcgttacttacttaatcataatttgtgtttaattattatttaatatgggccgtttattgtcgttgtatccactgggctcaaactttctgtacttgcctttgggctttgcttaatgcaagatttggtcgacaaaaaacaaaaatgtgtttagatatctcaactagctgtaaaatatcacctcattagtcatttactaaacaaaaactacactaatagtaaattacatcatatttttatggacttaatcgaaaaaatattatgttaataattttttaatttacggtaaagattagaaaaatatttggtctttatggatgaatctttttattcacgctcttttcttccagccaattaaaatttgtcacctaataaataataaataaatttatttaattatataatctaacttgccactaatacaaaattatatatcatcttggatttataagagagggttagggtttagattttatgattatatgagattaaatattgttttgagattataaagggtttaaattttatagttaaactagttttaat

SEQ ID NO: 28095 - DNA, 531 bp, Arabidopsis thaliana columbia
taaataatgattttgacttaggatcttcacggttaattttctaatcaacaaaaataaccaggtaaattaagaaaaattacatatgaaattagtcactcactagtaaactaaaaattatggaagaattaaaaaaacataataaaatatagaatggagaagataacgtatataaagatgagattcatccaaacagcataaagagaagcttccatatatcacagccatggtggttgtcactcacatctccacttccttccaccaaatctctccttccttcttccatctccgtcttcgtaatccctccaccacttcttcgtctcgtcccaaactcgacggtggtttcgctttgtcaattcgagcttacatagagaaaccaaactctttctccaccttcgctaacaaagtcatcggttctcttcccgttatcggactcctcgctcgaattatcagcgatgaaggcggcgttggtagagatctcgtcgatttcgctgagtttaggaaacgagttgggaataaatgtactcctgatga

SEQ ID NO: 28096 - DNA, 836 bp, Arabidopsis thaliana columbia
ctaaagttaagtcaagtgaaaagataaaactaaaactcggatatatattaacctaaagtttctctgtagcattatttgtgaatacatgattagtaatcaaaatttcaatatactatcaaattgtgaaatttccattttataatcaaatactactccgagaaaaaaatgaaaataacacatgatgatgatgtaatattcgggaagtagagaagagaagtgagaaagaatggagattggttcgagtggggaccccacgtgtcctctgttgtctgaatttagagtttagtcgcacacgtgcatggcgcgtgtgcttaacctttttctaaaatttttaacttattttaaaaatcttccaaagaacgatgtcagggggtcccacattagcgaagacgtgaccggatatgaaccgttgattagagggcaatgcgatctaaataagcggctaagatatcgagtcaacaaccaatctaattagtcattttgacccaagaaaagaaaacaaaacaaaaaacccaattagattaggattagtagatagatagatacggcctatttttattgaacaacaaaacaactaattataaataaaaaggacaaaactagttttccaagtttgactgagatgtcgcttttctcgaggccctctttactggaaatctaggctttctcctgaattttacaatttttcctaccttatcgtttttataaaaaaatattaattttaaattgaaaatttcgtatgaagtaatatattttctcaattcataaatgatccaagttgttgttattttcttagtatttgtaattatagcttatatgtatattttaaaattaaa

SEQ ID NO: 28097 - DNA, 601 bp, Arabidopsis thaliana columbia
tcaaaacatttttttctaagtatttaagtaatttttccggataatatttgtttggcaacgatcaacatatatcatgactcaaataaattttgatgtttctaattagtaaaatgtggagttggaaaaaagttcttgcaaaaggtgaaaagaacaaaaatcagagatggaaacacttcccacatgcttatgttagtcccaccatttagtggtagaaatgtaatttatccaaagaaggaggtcaaagctgcttcgtctctaatccaagtctagccagtattgttgcctgcataagagcaaacggtaaaagtgacggactcttaacgatgacgggtgttactgtttaatgtctcttgatcgacttttgttaccgtaacgacaacggcacgcgccctcacgctccgtaccagccttaaaagccaacacatttatgatttatccagtaactaatactaattccttcatccactaacgcaattgcatttaattgtttagtacgtatagaaaaaaagtaaaaagctatttataattataacttacaaagtctctttcaattagtacagtgtaaaacaaccaattattttctatattatacagtataaag

SEQ ID NO: 28098 - DNA, 627 bp, Arabidopsis thaliana columbia
  unsure (1)..(627): unsure at all n locations
ttttcaaatagtgtacatttcattaaaactaaactaatgtgaatatatatatgatgttattagtgatttggatttaagtgtagaaaagaatattccattaagaaaacatgataaaaagaattatatatagaaagtagaaaaccaggtttggatgtaactttggaagtaatgttataggaagaactggagttattgtaaggaaaaatgagctcgggtttggtcggcgatgtgaggtccgcgagctcgcgtgagcacctgcgcggcggcgcctggttcccgcgggtgccgttcgttgcgtttctggttcgtgtgggttgtcgtcgcggggaaagagttgtgggtattgtttaaaagtggtggcgnncggcgttgggtttggctcggtggggcgtggccgtgtcgtgcggtggcggcttcttgtgggtgcctgtctgtggtctgctggtcggtcgggttccttttgctgctgggtggttctgtctgttgtctggcgctgggtnngctgctgganggtgagtgtcgtngcgaaggctcggggcccgttgttcgttgccggttgtgctgtgatgcggagtcgcgccgtcgtgagtttcggtgtctttgttttgttttctgcggttttgggtg

SEQ ID NO: 28099 - DNA, 517 bp, Arabidopsis thaliana columbia
cgaagtcgctaatttttcacatatcggaattggaccgagaaggtggaaactacgcgcctccatcgagagtggtgtaaaccataatctattacataaaaaaaaagataacaaaagagacgttaaagcaatgtttctctgttacgcgctgacgcatctctaacctttttaggttctgtactatctttatcttttagtcaagtgttagaaaagtatcttaatcagacggttagggttctttattattactagccgcaatttttttattgaaacaaataaatagaaaaataacccaagaacaacaacaatctggtctgctgatgtattaattaaagaaaaaaataaaacagagcaagaaacaagaaaaaaaatgtaaagaaagagaaaaaaagctttcgtagtgtctattgaaaccagagaaaagccaaaggggatgcaaccaactatccgcggtagtagcggcggtggtgacgacggaggaggcagaggaggagtaggagggctaagtagaagtggacta

SEQ ID NO: 28100 - DNA, 598 bp, Arabidopsis thaliana columbia
ggctataaaattttgtgtataatctgtaatatatacgattttgccctttgctgacatgttaatttttattttcctctctctcaatctctctctcctcatgttgtagtcttctccctattgatttaccttcattttcatataaattcctctttcatccgaccctttcatcaaaatagtctctttaacacaagctctctttataattagagaacatctccaaataatagtaggtaacaacttcacctaaaatcatttgcgtgatttcgtctcgaacgctttttcattgtcaccaacacgaaatccactagaatctcaacgcttcgattgctccaatggtggcttatagatagtaattgcactttcctatttgggtatatcaattctcgtttgttgttgttattgggttcctttttgggtgtttcttctccaatttatgtaagatgctcttaatttatttcaatttatgtaagatgctcttaatttatttcactttccttttttttttggtgatgctcttaagtaatttcattttcctatttgggtcgttcttctccaatttatgtaagattaattttcactttcccaaaattaatttgag

SEQ ID NO: 28101 - DNA, 529 bp, Arabidopsis thaliana columbia
attgagtaattacatacacacaattaagcaatgatttgttttctaatacattaaacgtttgcaaaattagctttttgatttgaatagttttcatttcattttaatagttttaacactttcattttaattcgaacttatcgactttaggtgtggactagactagaccatgatataaaatatgggtcggagaaactgaatatgggttgggcttaaactttgatattgggagactaataagaccggtccacatgagatttttaggaaactccaacatctatttttgtgttgtttgcattggatgcttgtttgggtatgtccacacacaaaaaggaaaaggagaccaaaacaataataatgacaatcaaagcgttaaatgcacgaagcaatcaaagagcgtgcaagcagacaaattatgcgttcttaaaggatctcctttcgtttcatgtgaattgtctctttttgtttttctctctatttattattcatgtgtggcatgttaagaagataccttgaaattccgcatgttttg

SEQ ID NO: 28102 - DNA, 1036 bp, Arabidopsis thaliana columbia
ccctgctagtcgttcatttgtcaatctcattgagtctcttcttatcaaagacccagctcaaagaatacaatgggcagatctctgtggtcatgcattttggaagagtaagataaatttagttcagttgcctactcagcctgcttttgatgatatgattggcataaacacaaagccatgcctttccgagcgtaatggagatagaccaaataagacccctccaaagtaccgggagaaagatcgaaaagggggttcaaagcaaaatgagaactccattcaaggttcaaaaggccatgagacgccgataaagggcacccctggtgggtctaaagctcaagcaaagcttcctagtagagcaactgaggaaaagcatggaggtcgtcctgctgctaacagacaggtgaatattctaagattgtcaaggatagcaaaggcaaatcttcaaaaggaaaatgagaaggaaaactataggagacccttacctaatagcaacgagaattgtgcagaagtgaagatcgacaacactgatatggaacttgattttgatgaaaacaatgatgatgagggacttgatgaatcagaaggaaccgaaaacacctcttgtgcacaagaagaaagagtaatgagccaaaatgagaatcacagaagacaaagagttgtaagcagtaatgtccccgatgagaactcgtctgcaaatgaaataccaacctcgggtgaagcaagagattgccatgcagagcagtcagagccaatggacgtgtcactgcgccacttagtgctagtcctcaacttaaaactcaccgaggaagagaaatttctggtgttgctgttaatcatgactcattcagactgtcgtggaaaagctttcattgaaggaaatagcttcatcttttgtcaaaggcagtgcacgagagcagcaagtctgcttaaatcttctgaacatggctatgattggaagtcatcatacattcacaagctttggaaggcatctcgtgacattgacagaggagaaaaatcttttccctagtttactctgcga

SEQ ID NO: 28103 - DNA, 498 bp, Arabidopsis thaliana columbia
gaacatttattattatcgggattatattgattgttaaagagagaacaatatcgagttatctaaaatttattttgtgtcttgtttaaaagatcttcatcgaaagtaattttatgagtttatccatatggatagtactgcttgagagaaattgcggatactcactgaatttgttggtcaagcttggcttaagatggaagaaccacaacagcgcttctccggacaaaatttcggagaaatacatgcaacttcaatagtcgaaaagccttgttgtgcttttgaactccgaactatcctttctcttcggccatgatcttcgagatatttggttcgctttacatcgtcttgtgacttatgtttggttgacttgtaatccatgtggcaatcttcgggtgggattcaaacgttaagttcaggattcgattccaacatttgctcttaataagagccggaaatgaagccaaacgggccaaacatggatttattgtcttatatatatat

SEQ ID NO: 28104 - DNA, 531 bp, Arabidopsis thaliana columbia
tgtgatagcagattatttccaatttcagacatcattttttgtaaaaccctagctagaatccaagttattgaaatttccacgatctaaagcctcatttgattaatgaccgtagagtgaaaacagagcatgaatttaccaagaaaaataatgaacaattctggtcttgtaatattttcatgaaaaacaaacacggttcagcttctgtgagaaaccaaattacaacatcaaaaaaccctcaagctagaaaactataaacataaaaaaccgcaattcaaattgcagatccaaaaaaacttcaaaaataatctcaccttttcttctgaaacaaggtgagatcagaatgtttatgatcttattttctcatcaacccacacaaagcaaaaaagtttctgtcttattatttattttttgttgtgggaaatcgaaaaaccccttaatgtgggaaaaaagcacggaaggagacaagggcttaaaccccctggtcttatacgagagtagtaacacagaggacgtgtctgaaaaaagaagaag

SEQ ID NO: 28105 - DNA, 500 bp, Arabidopsis thaliana columbia
taacttcctcaccatgaaatcaatacgatccaatcttgaaagtatcggttcttctacaacagccattattgataacaaacgacaacgtttccagaagctttggttgtgtcggaatagttgaaagacagtatcgaaagcaaaactcgtcttctcttattaatagagtaataattggagattgaaagaacacgagctaggccacgtttaaatattgcagagagagttcatggagactcacacgtgttgttgataacacgtggtggttccagcttgcggacacctcttctgtctcatactccaacattacccattcttccttatctaatccctaaaatttctttacattatgtcgggaacaagataatgtattttggatgcttgtataaaaacattatcttatcccaagtacatttaccctaatttatttatttctccataaactatacaatgttttacgaggtgtatgcgaaacagtgaaagcatgccaataatttattttg

SEQ ID NO: 28106 - DNA, 526 bp, Arabidopsis thaliana columbia
cggtaactgagcaacctcatacttaggattcacatagaaattagaaccaccaccagtattcttaatctctctcaaatgctccaagtaattataaccatcatcaggataccctaactctaaaatctccttcctcacatgagcaggtaaagaactactcgaatccccaaaactagagtaaccataatccatctcttcaggagcatcatcaaaccgtgagctgtctccttcttcttcttcatcttcttcaatgaaaccattgatgttaacagggttttgatcaactcgtaagaagatcttatcaccacctggtgcatcactgtatcttgggtctgacgtatcacgaggacacaactcgaaagtcgccgcctttttcttatcaataaacttcttcttccccattacttactaattcacaccttcttaagggttttgcaaactgtaaaacaattacgaagatataagatgtctaacttctaagtcacagcaatcaactagactatgtttcaatcctgactaataaaatgta

SEQ ID NO: 28107 - DNA, 673 bp, Arabidopsis thaliana columbia
tcctattttgtgtgaatccaacaaaaatcatcgacttggactctagctatcatataactataatatatattcggcgatgagtcgaggatccacgtaatatgtaaagaaaactttgtacattaaatttccaagatcacaagttataagcaaggcacaattataataataaaaaattacgctacgcataagacacaagttaataatttaataattttaacagccgcctccacaaccaccaccacaacctccaaaaccgccggcgttatttccatagcgtgttcgacggagtgaactcttggtggtagtcttactcgactttgaaacaataagtcctccatctttgaccgttatacgcttgtttagccccggcggagtcggctgtttcttggccgttttggttacttgcggcggtggaagcaaaggtgaaatcttcttgcccgtttcaaccacttgggacggagatgccggctttttcctgaaacagcataagatactaaacatcaccatcgttataggaaatataaatgtgatgtgtatttgtagtgattcgtatagatgataaagcgaccttacatatatagatagccccaagtttccgttgacttttatgtgtgtagataaagttgccgacatgagcaacatggctctttatacatattcttctgaaaaatac

SEQ ID NO: 28108 - DNA, 620 bp, Arabidopsis thaliana columbia
ctctaggacgttcccgtccgtataagcttcgcgattccaatcctaaagctcccgaattcaaaaatttgaaaaattcacaaacccaagttccgattccatcgtcttcttctccgcaagagaactcaaagattcccaaatccaaatcctggtctgtttatctcattctctccacgaccgaacccatcaaaacatatgtcggaatcaccaccgatttttctcgccggttcgtcctcctctctttgaatcgagtttaggtagattctgatggaaaggcacgagctttcgattcatagttcttaaggaatgtataaagcaaagtgctttttgattaccatttaggtttctgtttcaaaaggcttgagcttttgattcttttggatttgaaggaatttgaaaagcaaagtgtttgttattggttgcagattaaagcagcacaatggtgaaatcagaggtggtgcaaaagcttcaagtgcaggaagaccatggctttgtgcttgcattatcactggattcacttgtttaagtcaaggtactatctctctttatctcctaagaattgaacattgcattgtgactgtatatatgcttatggatgatgattgatgagcttcccttgttta

SEQ ID NO: 28109 - DNA, 607 bp, Arabidopsis thaliana columbia
  unsure (1)..(607): unsure at all n locations
tgtcacttttgtaggttttttgtgaaggtcacaaattttagattacgagtgcaattagagtaacacaaatatttgattttgaactaaacagtcgtggttttaaaaatagtgttcaaaatcagaagaagaaaattgcactatgtagtaagaaaatagtcgtttattgaaattgatcaatttttattttagagtcgtttaatttgtttgtttataaactaaacaggacaaatcataacatgtttaccgggcgaatgtacaaacccatcggaatgcaatgcagcttgcaaatcaaatggatacaaaggaggggcttgtgtaagcatgagcataggctcaacaaccggtgcttgttgctgtaaacctaatttcaaatctcaagattctttcaaatctaatgatatcattattaataataattagtacatcattagatatatgtattttgatatgaataaaaatatattcaaatatgtttcgatattgaaccatctataatatggataatcattcgtaagttatagtacgatccaaacatttgatcgtatatattaataaagcatacgaatgctgaaatttatgttnagtatactcatagaaatttatttat

SEQ ID NO: 28110 - DNA, 872 bp, Arabidopsis thaliana columbia
tattgttaggcgataaaacaaaaaacaataaaaacgagtggatacacataccaaaaagaatgtgatgaacattagtaattttattttgatggttaatgaaaaacaaaataaatgcatcttggcatcttccgttggaaagcgcaaatagggcagattttcagacagatatcactatgatggggggtgagagaaagaaaacgaggcgtacctaatgtaacactacttaattagtcgttagttataggactttttttttgtttgggcctagttataggatcataaggtaaaaatgaagaatgaatattagattagtaggagctaatgatggagttaagtatgcacgtgtaagaactgggaagtgaaacctcctgtatggtgaagaaactatacaacaaagccctttgttggtgtatacgtattaatttttattcttttatcacaagcgatacgtatcttaagacataataaatatatatcttactcataataaatatcttaagatatatatacagtatacacctgtatatatataataaataggcatatagtagaaattaatatgagttgttgttgttgcaaatatataaatcaatcaaaagatttaaaacccaccattcaatcttggtaagtaacgaaaaaaaagggaagcaagaagaaccacagaaaagggggctaacaactagacacgtagatcttcatctgcccgtccatctaacctaccacactctcatcttctttttcccgtgtcagtttgttgtataagctctcactctccggtatatttccaaatacagctaacttgtttagtacacgagcagcacatcaaactctaataaacccaagttggtgtatctataatggtgatggctggt

SEQ ID NO: 28111 - DNA, 587 bp, Arabidopsis thaliana columbia
  unsure (1)..(587): unsure at all n locations
acgtttctcacagttgtcattcaatcattggtttaattaaaatactttccaattaaatattaataatatttgtgttcacacttatatttatgttcacacatatattgagaatcggaagttgagaagttgccgttgctgatgctctcaatctgttatttccaaaattgtcccgttctattccatgttttgccccaatgtcgaccaaactatttctatgatttgccccaatgaagagaatctataaaccaaatttcatcaattttgtaatttgaaaagctaggaggtgagtttgcttcttttattgtcaggaatttcttctgtttccgtactggtgactggatctcttaggtgacgctgcttatatacaaaggtcactctgcatgttagaagttgaagggtcataagcaaatgctatagttattaattcatggttatttttggtanaagaaacatgcaccaccacccattatttaattcatggttagttggaaaaactgaaccatgggggaaaaaagactttgaanttctattgtaattagacagtcattgcttacaaaaaataaaattgatgcacaaaatttaggata

SEQ ID NO: 28112 - DNA, 893 bp, Arabidopsis thaliana columbia
agtatatatatgatcgtttttgaatcaaacataaaagagaatctcgctcatgaaaagattactacacccacaaaacaatcgaaaagtaagccaagaatgacgcagcagagttaacatatgcgtgtgattcacgcgtgcgtccggcaagaaagacatttcgagagaagtgaatcaaacattagtgtaagtgtgaaagaagaatatataagaaagagagatggaataattttctttggcaagttggtgttggcggaatcaccatgtacgatgcatattgttgatacatatatatacatgtttatcaccgaaaggtccaatctttttcatttatcctcactttgcgcaatgactcaatcaaaggagatatgttgagagaatccgttagattataaattgacaagcctcttttctttttctaggggtattaatcatgctatatttcttgtcacattgatttgaatatcagcagtttaagaaaatcgcttagccaaaagttattaagaaatcgtctgatttctatcattgttgtaatcaatttgataagctagcttcaactttcatatctatgttagtgtttcaaaattactatcatatgcattccgttcatacttatttcatcaattagtccatgcatgcatgtgcttattatttagattaattatatttatgtcactggcaatgcgtatactattattaacccacaaaaaggtgaaactgattacaatttttcgaatcgtattcgtaaattactaatcaacatgttatgacgatcaaaacaactgcagcgttaccgtagaaataaaaataaattgaataacttagaagtgagagtaatgtttgcaacttgtgcagtcaaacagaatataaataagaaagagttagactttaactgg

SEQ ID NO: 28113 - DNA, 545 bp, Arabidopsis thaliana columbia
tcgattatgcttcccgtaacccatttttccggcgattttcccgacaaatgcaaaggtttttttgatcggcttagggttttatatgtaaattaggttttctaatggtagccgacggaacgatgttaaaccaaaccgaatcgaacaattgagtacacgtgtcatatatcacacctttcattcagggtaattacgtaattttaataaatgatttaagacaaaaccgtaattcccaaaaccaaaaccggacatatgattgagtacacgtgtaaagtacaccgcttggggtatttacgtcattttacaacctcgatttcttcccgttaagcttcttcttcttctctctcactctcactctaacagtcagtcataactctccgaccaacattcacactctctcgatataatatctctcttctacaaatatccttcgattaagaatccaatttctctagattgtttgcttgtttactgtacattagctgtgctaggtcgtgttaatctgagaattgtttcctgtttcagcaaaaccctagctcgaaaaaatg

SEQ ID NO: 28114 - DNA, 611 bp, Arabidopsis thaliana columbia
tgagagtgttctaaagtcttcacagtcttattttgccaatcatgtttttttttttactttaattttttttataagttctcaaagccttattattattattattttatttatttaaaagggcaaaaagtcttttttttttgttctttatttatcttatttttacagcttcgaatacatagtttttaaacaaataaatttaaaagctttctttcttcttcttcccatgataattaaaactctccacaagtttacgtatatttttttcaccaatcatttttaataaattaattattattaattttctatctttcttttaaaatctattttactaataattattttaatttaaacatcaacattaatgtaggtgtaagagagtttacataattaacatttttcaaaaaccatatatggttcatataggccattcaaaatctgaataacaacaaaaaggatttaagtgctattcataaagaaagaaatcttcagaagtaatttgtgttggaaacatgggaaaaatcagttggataatttgatgaagcaaaacaacatttatcataataatcccggattttctcagtttacgcacttcttaatgcaatttttggtta

SEQ ID NO: 28115 - DNA, 616 bp, Arabidopsis thaliana columbia
catttctaagtcatgataattctgaatccacgttttgaattttattagattcagtttatttgatgttttctcgattttattctggttctttctcttgtttaatatagaggtttgatccgtttttttctcgttttatggatttgaatcttcactttaatgttatttagacactaggtttttgataattctagtgtaaatatgtgtgtcctcgagattgtccatgagaatctctttagtctttatagttgctacagcgatttttcttatttggatggaagtcagtttcataatttcatttttttcgtttggtgtcgctgtttaaacttcgtttctgtctttgataatttcaaattcatattaaaacaattataagattggattagtctgaaatcctagatttaaattgcactaatgtaacaatctacatttgtgtttgtgtattgaactaaatattttgtctgttcatttattatttaggagctattcaatgcaaataaattatgatagtttgaaacttaacaaaatcacatttcttggttttggttttatgtagaaggttgaatcagcagaatcaagacatcatgaactcacctcctccttcttctaatgatggctt

SEQ ID NO: 28116 - DNA, 629 bp, Arabidopsis thaliana columbia
ggttaatcataggctagcccatgaaatccttcttctgtcagtcttagggttgaccggttgagctggaaaaaatcatctgggtttagttttgacccaaacgtcgtcgtatgattctagggttttaggtttgtgttacatatttagattcggtctctctttctctctcagaaaacagtcgaccgtcatttcttcgacggctcgcttctcttatcagctaaccctaagtacgccgactttcaaattcgccactcccgttcatcttttctctgcgtgagtctttgctttctcttttccctgctgttgttgttgtttctttttggtttttattctcaatgttgatgaagaatttttggtacttgtgtctttagactagtgttttagtttttgaattccatggattatgatttgtcacttcgtaagtttggtgctttggtttgtttttcatctcaaaatctaattttcctttggcacaatgtttgattagtatctcataatcaattagttatatatatgctttatgattaagctgtaacagttttgtttggattttgtatggttttgtcacagatcgataacgaagatggtcaatataattcaagaggatcacagtgtcccaatggaaggagtcg

SEQ ID NO: 28117 - DNA, 472 bp, Arabidopsis thaliana columbia
tattaatgaaatcaatgaaaacaacgaagagacgatcaggctgagacgacagtgacgtaaacgggaaagatgtcatgaaaagtctactgcggactattttcccccataccttggataagaggacagacctagctacggaatctcgatcactaggtcaaaaggaacgacatatttgttcccttccttcgagtttgcaaagtttgtgaattgttctccgtcttcaacttcttggactgatttcttgctatcatcatggtgacttgctcttgtttttaaaccctgtatgaacctctacgtctcctcttgcttctttaagtagtaagtagaaatagagaggtcggtcgaaaatggcaacaggcctatagtatggttaatgggcttgaccatttaaccaagtaggaaaatggatcttgcgcaaccgggtcgggtcttcacggtttgattgtagggatatcttgcaaaccatattaca

SEQ ID NO: 28118 - DNA, 472 bp, Arabidopsis thaliana
tagaagcttagaataaggacacacataatactagatactatttcaacttcaatgatagacattgccgcttccgccaccgctcccactaccactgccacttccgctaccatcaacaccaccaccgcctccgccgccaccacctccaccaccgcctccaccaccttctacatgcatatacacatcagggccactagcggttccagttccacttccacttccacttccgcttccactaccgctgccgctgctaccgtcaccgccaccaccaccgccactaccttcaccactgcctcccccacctgcacttgctgaatactcaccactgctactgattcatccactacactaacataagccagtatcgctgccactgccattaaagaaactaccattactgccgccagaaccgccaccgcctccacctccgcctccaccaccacctccacctccaacaactatgcctccgggacag

SEQ ID NO: 28119 - DNA, 487 bp, Arabidopsis thaliana columbia
tatgcattgtttctgtttcatgtgagataagcaagaaaagtaagtgggaaacaagaaagcagaacagtgagattaccaattgtgcaaacaatcatatcatatagtatactttgttcgccatcttactgtcacttaaacaacaaaattcactatcatcgtttagcggattattttcaactatataacccagtaaaagatagtttacttgtcatgtggtatatttgacagttatcaaacttttgagagtttgtgacacgtacgatacagacacaaaatcaaatctccctctccgaccattttaatatcttagttacataaatcacttttccttctccagcaacagaagaattctgctcgataatagattggtaatcacaaaaagaaaagaaaaagtgttggagatccttccgagagagacgcgacaatctcttcctcttcgaagatgagtggtactgtgaaggatatcgtttcaaaggaggagcttgat

SEQ ID NO: 28120 - DNA, 525 bp, Arabidopsis thaliana columbia
cgccagtataaaaactaacgagcttgtcggcgctatccacagaacaacaactcgtgtctaactattatcaatagccgctagaatgattctctctacaaaacaaacgaacggctgtgattaaaactttgttaaccatggttagcgcatcagctgacgtcagtaggggtagtatggtattgttttttgtcgaacagtagaaaccccccaaaaaagtgcctactccctccaaagtgccctcaatgggcttacaaacttgtaaagtgccccatcatgacacaactccttataagagttagagatggattaggagtgtttagacaacacttatatccattttctcctaaaagaagctacaaccaacaaaatattgcttagaaacagtaaatagctttgttagagtttctatcctcataatgtacaacaatccaatgcatttgactagttataagagttagagatggattagtagtgtttagacaacacttatacccattttctcccaaaagaagctagaacaacaaaata

SEQ ID NO: 28121 - DNA, 532 bp, Arabidopsis thaliana columbia
gcagaaatttttgccacgctggttcaaactccatagaagtaacagttttgtttatattaacataatttacaaatcttggaattgggatatctatagatattttttgaataaccacataactagctgatcagcatgaacattctagatatcagtcttgtaaattgacataattttggtggaaacatacatttggtattcttctccgaaaccgcctgttttttacattgtagccgagcctaagtacaataaataaaaattcaaagatgtcaacacaagacctcgttttttaaagttgaattagctaggtaaatctctttggtatataattaagtcggagattgtgttatgtagctagctctcttttatgtataagctgaatactctttattataagcagtttttatgaaatactataacatattcctccgattctctattttcaaataatcgtttgtgttgtgttggagttttgcagacaaatatggacaagaagaaacagtagtatacgtcgtacgtaaaagtttatcttatt

SEQ ID NO: 28122 - DNA, 583 bp, Arabidopsis thaliana columbia
cctctcaagtcatttcacaaagtcggactagagtcaagctcaccagtgtttcgagcaatttatgttgatgtgcttttccataatgccaagatttccacaaaaagaaaaaaaactacggtcttcatattataagtcctcgaaaatcacaacgaaatctttgaaatacaaattgtataactttcttgctttagttctttagcattacatgactcttgtatcgtgaatcagagacacatatatttacatgttattttcctgatttacactcaaaagaaagtcatccaccaaaataacccaacttcttttcttatggccaaaagattcaaaccaaagtttttttttgttgtaggttaaagtacgaaagttattctttgtggaatgaaatgtaagtgggtttagggcccatacgaaaaactaaaaagaccgcgaaacaatgagtctatgaaaacatggtttagtaagtaacttgtctacaaatgtttcaaagaaatttcagtttgaacctttcaaacataataataaaacaaatagacagcaagagaaaacttggtgacttagaaagtagaaccgtggacacgaccat

SEQ ID NO: 28123 - DNA, 596 bp, Arabidopsis thaliana
gatccccgagagattatggcggaggggcaatccccggagaattcaccgccgtcccctacaccaccatctccgtcatcatccgacaatcaacaacaatcctctcctccgccttctgattcctcctctccttcaccaccagctcctcctccgcccgatgattcctcaaaatggttcacctcaaccgccttcttcagactcacaatcaccaccatctccgcaaggaaacaataacaatgatggcaacaatggtaataacaacaatgacaacaacaacaacaacaatggtaataacaacaacgacaacaacaatgggaataacaaagacaacaacaacaatggcaataacaacaatggtaataacaacaatggaaatgacaacaatggcaataacaacaatgggaataacaatgacaacaacaaccaaaacaatggcggaggaagcaacaatcgttcacctccgcctccttccagaaactctgaccgtaactctccttccccaccaagagcgctggatcctcctagatcaagcggtggtggttccactcctccggcaacaatgaaccaaacacggctgctatcgtaggaattgtggctgg

SEQ ID NO: 28124 - DNA, 604 bp, Arabidopsis thaliana columbia
gaggggacttcagggccaatatccgtaaagaggattagggtttaaaagattcttcgaattgaagaagagtgacgatgaaattgctgacttcatttcactttagtccgatgatcatataggtaggtagatgatattgatacttcacctcacaaaagccatgactcatgaatcctctgcgtttgcgtttcaaccgtattgacgcggttcaatcaattttatacactaaattcgaatgaaatcgtaccaaaccggataaatttaacatccttactaaatccaaaacagaatacatatgggcctgaaaacgaattggtcttgggcctgaccgaatcaatcgcttttctctacattcgtctagaaatatccatctacacttctccaacgatcaagacgtttctcgaacgttagagaagcgcttttaagttctataacaccgaaacaatcgctctctctacattgctctagaactatccaactcaacttctatttaatactttcttacatcaaaatcaaaatcaatcaaaccaaagaaaaagccaagaagcaagaaagttaacacaacagctaagaatggatttggagtttggaaggtttccaatatttt

SEQ ID NO: 28125 - DNA, 497 bp, Arabidopsis thaliana columbia
tctggttgtggatatttatatgagatgcaaactcctgaaactttggcgcgaccagaaaatccaaatccaaagtggcctgtgccaaaggatcttattgagttacagccttcatataagcaggtagatatgcgtataaaccatcttataagttaacgacttggttcctggaatggtatactcaaatgcattacttcattattcaggacgattggaatcctgactggcaatctacgtccagcagtaaagtcagttatctcgtagacaggctgaggaagttacatgagggtaataaaaaaagcattttgtctttcaacaagactgacaatgacaacctggaagacaatcccccaggtacctcggaagcctttttggggaaagaattacatggacaggattgtggatctcagatggtatttgttgataaagtattgattttctctcaatttctggagcatattcacgtgattgaacaacaggtatgaattaccttgtatttg

SEQ ID NO: 28126 - DNA, 529 bp, Arabidopsis thaliana columbia
tgatccatgcagacacaaaaccttgaaataaaaaactaagacagataagagtgctggcgatagatcaccaactaatttcatcatatctcatagaagtccaaagctgtcctagagttagtttataactagtataccactatcttgacaatacaatccatttatcaggcagatacattctgacaagaaacacttgaatcacaatatcgacccactaaagcaagtagaggcaacagaaacactaaggagtacgatggagacagtgtccaaaaggttcttacttgagcatccttatgcttgctagagagtttttcacagtcaacgttgtatccattctccttccctgcacacgaatctgcccgagtcaaatacatgcttttaagagctcaacagttgaacaatactcccctaaattcataaattgatattctctcccgcgccctccaagaaggaaatgacccataaatgtttgtcctctaatctcaaagcgaacaacacagaaaatcttccatccttcaaggttgagactagc

SEQ ID NO: 28127 - DNA, 570 bp, Arabidopsis thaliana columbia
gaatggctcttaaggtatgctctttatgctctttagttatctttctcactatcatgtccttgagaaagtggaatgtttcggataactgtaaaattactgagaaaattgacttttgtattagagttactcatttctttctttgagttttcggaatggttaattgttttagtccctgaggatgggttttgcttcctttgcagtacgcagaactcaaaccagttccttgcttgagctattcggatgcggtgaagcttagagaaagctgtgctactcctattttaacgcaggtacgtagtggttctggttactctcgactgaccggagtaccgtctatctgattttagttgttcttcagctcgtctttgttacattaatttcctaaaacatatttatgtttctgataagaggaaggggtgttagtagttttcgtcattagtatttcgaaattcaatctaaacactagcttgatttcagtatcataggttcttttgcagaaagtcttgctcagtttagtttccctatatgacatcacatcgtagttttgtcagtgcacataggattttaaattta

SEQ ID NO: 28128 - DNA, 381 bp, Arabidopsis thaliana columbia
agtaagcaaacccttaattaattaaatataactggaaagcgtgtacactcgagatcgcagatagagatagtaggactcagagaagattgtgccactaatcatgctcttgagcctttctgttcaacaacgaagcaattgcagagaaatcacacgtttgtgtacgacatttttatattttaacgtcgatttattggttagttttatattgcaactatattataaaacgaaaatattgttgacggaaaaatggaaattttaggagccagaaaaaagggaaggaaacaataattcactattacgagaatatataaacttgtacgaaaagtcaaggaaaccatttatcacctgttacaacttggaatggaaagcggagaatatatt

SEQ ID NO: 28129 - DNA, 491 bp, Arabidopsis thaliana columbia
tcatcttcttcttccaatccacccagctcaacctcctcgacaacatcgttcccaaaaaaggcatattgagatgcatcaaacattgtgttacctgcacaaaagaaaccttcagttagacaagcccaaacaagagatgaaactataagactctgatgcaagtttgatctaaacctgaaacattcttccggaaattgctcaatcggagagaatctcaacaggcataatatggtttctcatttcacgatttaaattagcaactaagtcttccctaatcttcttcgtgggagtacaagacaatgaaagtaaataaaatctaacgaagaccaaggtctaacgaatcaactaagaggcaattcaagttttatatactcctaaacagttgaagaacaagaaccaactagatccagattcaatctaacagagaacaagacgccgaattcaaaagagcagaaacaaaacaaatccgagaaaaaagaagaacaaacctgtag

SEQ ID NO: 28130 - DNA, 576 bp, Arabidopsis thaliana columbia
gtggtgttagtgtttgtttcagttaagataactgaatttaagaataataataattgttatattagttaaagaattattttaaatatagtttttgaattatgattttatttattacctttttaataataacaaatcatggtggatatttttttcaaaaattactcattgcaatatctactcaatgtttttatcaagattttataaaatacatcacatgaacaataaatcttaataatataataacacacatcttccttctattccatgcttcttccttccattaattgttcgttcttcttagaaattctaattttcttctatgccatctctctttcatttgtagaatcaggatcatattttgattataacttaagatcctttgaatcctcaatcctcatcgaacttgagttttttgttgtacaaaaaaaaaagagattgattatttggtcggaataaaaataatcatttgtaagtgtaacctttatatttcccaaactgtgaagtaaacacacagctctaatgatcatcaatgcatttatatattgattatgtagtattcgtggaagatttttgaat

SEQ ID NO: 28131 - DNA, 582 bp, Arabidopsis thaliana columbia
ttgtttcttattttcttctttgttagtgatcctccaaggctccactagttcacacatatggtggagtgaagtaaaataattatcaataataattaataagattcataatttctgaactttttcgttctttttcttttttcattgtggatgatcatttacgtgaattaagaactacgcatgaaaaaggcaaacgaagtaacttatatcgatattttccggcacacttttttattttaatggtctgcatgtcgtatatatcccacacaatagacatattataagtaatagcaaaattataacgatacaaaccacgtggaagtaattaaaataagtacttaaccacaaattacaattaaccggtaaaagaaaacaaacagtttcctaaagcaagaacataaattgatcacttggtcatatcatctgataacgcatcaaatgatgaaacgccaaacgcatattcatcagacgccagacgcaaattctctagcaaagttttaacgaagaactttgtatagcatcatgagcaatcagccttggaaactcaatttgttgtttctcagtagactgactgctcgtgatgtt

SEQ ID NO: 28132 - DNA, 617 bp, Arabidopsis thaliana columbia
ttagatacagattggttaattctcgtttcacgaggattgatgacgtggaatatattacgtaccgttagattagaataaatccgtcgttggcagtgaacggctaagcatctctcacctttttaaatgggccattaagcagcgaatcaaaattaatttcgagttttatcttttaacgggctaaaatgggcttaatacctaaataataatctgttagtcctagacgtgaatcagttaagagaatgccatcaatgttgatacaaagtccatgtttggttacaaatgggcctaattatgtatcaataatgggcctagttatgtatttataatgggcttagttatacatgaatctgtcccgtgaaagcgataaaagcgaaaaccctaaaaatagttccgtcttctgtttaatctctttttcaaggccaagcgagcaagagacgtcggagcggcggctactacttaggtttcaggttagtaatcgccggaatctccatctctcctctaatccgatgaactgctttattgttttgttggaacaccggcttagttaatctccccaatttgatgtttctccagagaatctagatcccaatgcattttcagagtgtgtaattttaggg

SEQ ID NO: 28133 - DNA, 362 bp, Arabidopsis thaliana columbia
cctagttggcttgtttaccacttttacttttattttcttttgtgtatatgttttatgattatatattaataataattatcgattaaaattaagttaaattaaaaaggttatcgttcaaatccatttcactaaaaaaatgagtttttttgtcctatattcaaatcaaatgcaacaactctctctttataaaatgaaaatgatgaattttgatataagaaaaatagagactcgacttcgataaagttttggacttcactgaaaattagcatgaagttatatcccgttcaccctaagtcagggcagctgcatgacaagttcaagacttctcatagcgcaagataatcgagaagacaaagcaaagt

SEQ ID NO: 28134 - DNA, 582 bp, Arabidopsis thaliana columbia
gcatcagcaaccgactttcctttgttctctggttcccctgcggattctggtttcctcgtctccagaaagtgaagtcggtttcgcaaaatctacaccacaacgtttacagtgacaagatataacaacctgttctggagtttcatataagatattacattagtcaggtaccatacctcgaggtgggtttccagagattttctcatttcttctagcttagtctccgacatatttgcataggcatgagagttttcaacaggaaggttgtgttgaggaagagtttgatctggttcagttgacacttgctctgttccaggaactcccgacgaccttaacataagggacaaacatatttgtcagttgacgcttgctctgttctacaactcgagaccaagcatggagtcaacagataaatacataccatgctactgtgtttgcagatgggtaaaccattgatttcccatacacggaggctgcagaagcagctgcttgaagcctggcgtggtgcctgctcaaactattattggaaacgccagctgaagaacttatttcagagccctggttacatgagcttgatgtacctga

SEQ ID NO: 28135 - DNA, 480 bp, Arabidopsis thaliana columbia
ggggatcggatcccgagacataaaagtatatcaataataaaaaaataatatatatttctaatttaattatgaaatacttactacttaatttcttttgacaagtgattccattatttgtttattgtttgtctacaaatgatatccatgttcaaactgtgtcaatcattcagaataggtcaacaacggttgccgtccacggtccactccggcctctaaacttttttttttttttaagagcctctaaacttttttttctgaagtaaacaacaaaattaaaactataatatatacaaaactgttacataaaacgtggaaaattaaaaaaccagtaggtaggtcgaccaaatcaaatctcatataaatacatacatacatacgtctttattctccactgctctatttctcaatctctctcctaaatcaatcaatctttgtattttcatttagccagaacaaaaaaaatggtggagcaaaagagat

SEQ ID NO: 28136 - DNA, 861 bp, Arabidopsis thaliana columbia
gttcctaagttatcaaatcgtatgtgggtttatccaaggaggctagagaaaggatacgagtaaaatttgatgtccaacaaagagtgaagaattgctcagtgtgtcaagggttgatattgacttaccaacacgtttgctctccggaaatttcttctttagaaccttgatgcaattctgcaaaaaagaaattgtcataacaaaagaattttcagaaaacaactcacatcacaatgcatccatgatacatagaatatatcaaaaatgcaagaaaactctagaaaagaggctcaaaccgaagaaatagcatacacctacagccctagataactgatgctttcaacaaaacgtgatcttaaaataggatcatgtagttttcaagttaccaattgaaattgtaagggaaattcacctgtgcaacaccgagagattgacagtccatagctgcaattgctacctgctcatacagggtccattctgcacaaataaaggaatacgctttgtattttagttttataaaacaaacataatgtgcaagcagctcttttagctaagacaacaaaaacaaatcgaactagattgagatactacaggtgcaaaaagtctttgcttaattatgactcttcatcagctaaaactatgtttaatttcccaactaggaatgaaacagtgaacatataaatccaagaataccagatttagcattgagcagatataacgtagatcaagtatcagtaagcactggaagtagaacaatatcaaagtgaatttcaagtaatttcatttaaatgaaactcatgaattgaagcaattgagtggagcacgatttaggaaatcaacaaacaaagacactctcaatgagaa

SEQ ID NO: 28137 - DNA, 530 bp, Arabidopsis thaliana
tgtttcttaagatttctggtttggcattactgcaagtttacaatgaaaaaaaaacaaaaacaaatttagtcaataaattgtgtatactaaaacacgaaattccactaaaaccggtttagcgataatactgaaatgaattatagtcataacggattctaggcaaaatgcatttcgatttttgtgggtaagagaagtggtaaaatttgattgtaaaatggttatattcgagggtgcatgttattgacaaatgagagttggaaatgatttgatagtaaaatttagggatagaaaattaccaaataacccctatagtgcgattggattagcacggcggcgctatcttcctccgtctggcggttgtagccggcaagtcgaacgactttagcggcagcttgtgcggctgcaaccgcggcttcggcagcagctgcagtggctatagctacagccatagcgtgttttctgtctccaacattagttgctggagtagatgctgtgctctcgacgtcatgggagatctccggtgaactttc

SEQ ID NO: 28138 - DNA, 766 bp, Arabidopsis thaliana columbia
acaaaactcagtcactcccatcttcacctttcccatcgcgtacatgctctccacggcatccaaagccatctctcctccagcggctgcagtgtattgctttactatgtacttcgccatggctgattcctattgatacccaaaaacagatcaaaagcaaaatcagaaacttgttgctcaagtaaatctctgatacaattgtttagacgctagcatatgaaaccctaaatcaaacgcaagattagtataataacttacaatagattggtttttaatgagattggagatgggatgatcaatcttggcctgatcggaagaaatagggagaggtatcgacggagctccaacgattccaagaagcatctgaatctgagagtcacgaccgccgaatagtgtggcaaggctgctactgttatccggcggtgaccggagcaaactagatttgacgctacgccaagcgccgctcttgttgttgtccgaacagaacaactcctccggcatcggaacttccaataccgtctctaaaccgtcttctctatcgaaattaggacaaagtgttctcatttttaactcttttagcaaaatcttagaagagaaatgttattgccggaaaaagataggtaatcgaaactttttctttcgttggttacaataaatttagaagatgaaagggtattcaatatatatattacgagagattgaataacataagctcatgggttggtgatttatatatatgaacatgtattagagaaatacagagagatga

SEQ ID NO: 28139 - DNA, 590 bp, Arabidopsis thaliana columbia
tggatcttctaagcactaatttgatgtccaaagtctcgggacttaaggaaaatgtttttatgacgttcttgacgtatttgaacttttatgcccactggttttaaatttggaaggaaatttgagttttagagatttgtcgttagctagttctcggtgttttgatatgagctttatgcctttatacattggttcaatttaaccatgcctttacttttgaatgattcaagtggttagactcttttcaatttctttgcttatagcatagtaacagcatgcgaattcaactttgtttttattttattattattgtaacaaaacacaacgtatgttgttgccaaaaccatcctgaagccggtaaaccaagactctgctcataattatcctaaaccaaatggggagatcgaaatgtaatcgatgcatggaaaaggaactagaaattgaatgaaacttgtgtggcgtgtgatgcaagcatctgtagcagctgtagcatcagcctattgatgaaacgaaacgctagctcttaattgggaaacattggatatacaatgtctcttttatgtttatcggaggatgaagtggatgattttagt

SEQ ID NO: 28140 - DNA, 168 bp, Arabidopsis thaliana columbia
ttaccaaggggttagaataaaacagggtaagggggctgttgggagtgctgattggtggtgggtgtcgttttatgcaaggtgcctgggccaggccttactgacagggtaacactgagcagagacccgaagaagtgggtctctgggcaggggtataccaggcagagggca

SEQ ID NO: 28141 - DNA, 317 bp, Arabidopsis thaliana columbia
tatcttagaaaacaattttcgtctctatcatcccgtcgatcacctaattcactttcactatagtctatagtcatacagagtgatgatgataagacataaatgcgattctgaaacacgttgatctggtctaatgaagttatagtcatagctagagtacaatggtgaagtaagggaagtagggttttcctttccatgtcgtcagtcatgacgtatttattggttgaccattataagatcgtatagttttccacttttcgtgaccgttcttagcttgtgatgcctttacatatgtaaaactcctcttaggctatatataa

SEQ ID NO: 28142 - DNA, 897 bp, Arabidopsis thaliana columbia
aacaaatgtttctccgtaaaacacaatcttatacaaaaaaattcaaagccattaacatcaccaataaagtttttttagagtgtcagttatatatataatactacctacacatactgtgttaaaatcatttaaaaaaaaaaattatactccttaagtcttaactaatatactaatataacttgtaagtttttctttcgattaaataaactacagtaatatgaatgattaagattttgacaaaaaataatctgcattaaaattctataataaacagtttatcaaaattttagtagaaagttgaatggtaaaatgttcttaaaaaccgtagcaaaaagctgtcgttgtctctgccacgtactcacacactctgtttctctcaaacatatcacatgatgacttcatctccctccactgtgcttaatcaccctactcaccagtcaccaacctctcttcttccatacccgaattctcattttaggatccgacccggtttttgtaaccttatgaagcggggcaagaagaactcggatgcgggtgaccgactcaccaactcggatactcgaaccgggtctagcgaattgaatgcgatgatgaaaccaagtttgagttcgatgaaaacgatgggtctacttctggcggttcttatggttgcttcggttatgttctctctgtccgtggtgctcagagacccaccttccgatgatgttattgagactgaagcagcctctagagttcttcagagcagattgcaccaaggtaaatatttgatttttactctctttgtttgagactacatttagtggattatctcaaatgtcccatcataaaagttactttatttacgcatgaatcgttctccaaaatggttggttttgttaacacatgaacttgcatgtg

SEQ ID NO: 28143 - DNA, 1015 bp, Arabidopsis thaliana columbia
tattcatttcaccaacgcattgtatgggacttttgctcgtcttttggtcaatagctacatgacaacgggttgcagcaccaaacggactaaacaactccatcaaattcaatccacaggcatctttagacaaattagtcacgcagacagagttttctaagtaggagaaaaaatcaggcatgctcagaagtttggaaaagcatcaacatttcactgctatctatactcgaggaaggacacagtcagcatcacatgaagcatgagaaactatcaaagaagaatttagaggtctttgccatcgatagtttagatacctagtaaaatccctctacggaataattagggtttgctccaaatcaatcaattaccaaggtcagcactagtaccatctttctctaattgtctcattgtggatccccaaaactgctaggataatacacctgaatatacaacacaatgaaagaatcatcaaaactacgaagaagaacaaactcacaaatcctacagaacaaaagctcataccaaaagtaaaacaatgacttgttcttcaacaacagaaactctacctaaaactttttttttatagaaatcaattttttataaatctccagtggcacaagaaagtctcacacttgcgacccaatgacgctgaaactcaaacaagatacgaatcaacccaatcaaaacccaacctctaaaattgagaaatttgcgatcgagagaacgagttagagagggattctttgatccgcgacgtgtaattgaaggaaggaagatgatatttctctcttcaacagtatctcttaaataaataactcaattttattttattttttctggtaggagaggggggaaagcccccaacagaaagaaaaaatacaaaaaactgaataaaaatacaactacactcggaccgtacgtaaccgcacaactccagctgcgtcctccaacgctatcgaagcaacaggagccggcattgaacacaagcatgaaaaccctacggagtgagacgcatagt

SEQ ID NO: 28144 - DNA, 719 bp, Arabidopsis thaliana columbia
tgtaggaataactgaaataaccgccacaattgagatcaatcatcactcttctctgcttagcctctcccttttgcatataggatcaagccaatgatgcatcaaaagggtctattgtaaagaccaagcaatggtttttctctatcttcaactcgtttcctagcagcttctcttgccttcaatgcagctttctcttctgcagatactttcttcggtttctcatcttgcctctttctcttgttgttgccaagatcaacagatgaagccgctcctttcacagctcttttaggatttaaagaagctgtgacaagacggccaggtggtttccccacacttggtccagctcctgaagaagatacaggctttttcacgagaggtactttggttcctgatgatgttttaaccgcagcgtaggcctcgtcttgtgtcacccaatgtcctgtttcattacccgtgtaagcatacacacgacgaaattgtatacaatcatgtttgcaaggaaacaaataaaaaaaactcgatatatattacatacctattgagtcactgtaatagaatccagactgtgaatcatagtgcagaccattggtctggttgtaataatagcctgaagcactgtcgagcatccaatctgccataacaatatggttactacatggtatatgtataaatgaaaaaggctaagaaaaatggcaatcaaaatgatgaaagaacctgagagt

SEQ ID NO: 28145 - DNA, 727 bp, Arabidopsis thaliana columbia
ctcaaccgatggggggagcaatgtagagcaaagaaaggtctcaccatcgttactacatcctttgacggttacctgtatctcatagatggacccacctcgtgcactgacgttgttgacattggcgaaacttcgtaagtcacttttgcttcctctcggcacgtaatatctatagtatattgaccaccaatgtctttcgagttacagatacagcatggtcttggctgataatgttgacggtggagatgatctcgatcttattgtctcaactatgaatggaaacgtcttttgcttctcaacgccttctcctcaccatccccttaaggcaagatcaaccccgaactctatttgcgagcgggttctgctcaacatctctttgattgttttttaaaatgggggaaattactgatttcacacttggttcccgaattcatcaggcttggagatctagtgatcaaggcaggaacaataaggccaatcgttatgatcgtgaaggcgtttttgtcacgcattcgaccagaggtttccgtgatgaggaaggcaaaaacttctgggctgagatcgagatcgttgataaatatagatatccatctggttcacaagcaccctacaacgttactgtaagttcctgaaaccatcaatagatgagcaatggcttcttgctgaactagaccagctgtcttcaaatacagacgacgctggtggttccaggcgattaccagggagagag

SEQ ID NO: 28146 - DNA, 1006 bp, Arabidopsis thaliana columbia
tcataatacaaatacaatttaatttgatcgtatagaatttaaatacaattcaattttgcaatacaaatacaatttaattctgtatactccatcttattgttagtttcctatttacacatgttaacatctgaacgatagacttgacacgtgtcacgatcaagtgagttactaaatttgaaaaccatacattacatagtaagatacttgctattaatgcagttttgatcctagctaggttgaagtttactttcctgtttttgactgcatatatgatttatcagaaaaaacttaaatacagcgacaaaccttgttttcttgtgcatattcgtagtcagatgtgaaaagagagagacatgctgtgaccggtcccgatttcaccatattaatcatcttctatatgtcattagtcgcgcacaaacacatattgggaaacttctcaatagttgtacttgtatgccttttttactatgcaacatcacgatccatctctatcttctaggtcctcccttggaatctcattgctctacatatattcattttctagagttgatatctaattgggaaaatcacaatcttcacactccaactttagggggagtattgagatatgtataattatattagaattagaaaaatgttgaattaaatcacttaaactgtatcacaaaactgagtgatattatattaaattacttatttataaatgaagtaaatatttatcacttagcatcaattatattaactaatgtcataactaattaattttacttcaattaaataaaactgattcaatttctattagtttgtatcacttttctaaaaatgatataaaatataagtttacatttttagacgccgccagtggatggaaggaagccagccccctacttatcttctcttagatagtagtcaatcagtcctatataatgccaccttctcactctgatattctggatcatgctacaagatgtatcagagccgaccctagataagtgtgaagcaagaa

SEQ ID NO: 28147 - DNA, 579 bp, Arabidopsis thaliana columbia
gtctccccgcttttttatccacctctctttctctctctctacgtacatgtacatgtattgatttagagctgtaattactaaaacagggtggagttcccgcacgataagggtgttgactagggtttgtttcggtattcaattcttattttttccgttaaaactctttgttatttcgcaagtgagtcagtgatgatgacgaatcaattcaatcattatgttctctcatatatatggtttacttcaattccatcatctcattcattcattcaaaacatgtgaccattttatttgaaattgttaattgttatatataaccatggatggacacaagtgttggagaaccccaattgggcccataataaaagccaagcccatatgacaaggtatgcctgtacatctttagggggtttatatgtctctgatgagtacaacaaaatctgaatatggttgatgagcttgaattatatattgtcttaattccttcgaaaacataagtaaatcatttggtaacttgacgtctctctactcaacctttttttttgttggcggtcttgtctctttgtatagacaagatgtcat

SEQ ID NO: 28148 - DNA, 802 bp, Arabidopsis thaliana columbia
tactgcgtaataaatagccaaacacgcaacccaaatcatgtccagtttcatcattacgattctgtttatttatactttttaaggatgcggcggaatatcttggcagattctctctaggcatttaatgctctatatattttttcagttaactacgaatatctcatacttatacaggtatagttataatattcgttttgcaagattaatttcacccaaaagtcaaatttacatgtctacattcttaatttaactctcccatgtatatatttttaactgacccttttattatattcaagccagcctgttacaacagtagaggagtccacatgaacagcatattagattaaaacattattacaaagactttcaacaaaagtagacttcaatgatcatctctgtaacttctttgcgagagtaagtaatatgagagatcactgtaagcatccagcttatgatcaacttcaaaaaacttgtcagttcatctcatacctaaacaccagcacgtaggctatgtactaaaactgaaacgtcaccaagtatactacaccttcgtgctacaaacttaagagcaagtagactaaactaaaaagggctgaaacaaccagctgcaactgagattgcagagaccaaaaagtgtgacagaattttcattattgaatacatcttttctcagacggctaatgtctatgaaggtataagatcaattatcaagttcaccaatcaggaagatttcaaagttaacattcatttgactaaccagtggcacaaatccaccaaaaacagcctcaaaagacaaagatat

SEQ ID NO: 28149 - DNA, 602 bp, Arabidopsis thaliana columbia
cctagttaataagagccggctaacagaaaattgagagaaaaaaacaagaatagttttttttttttcgtagttaatcctcatgattctctaaaatctatcgatctctctcccgtaataaaatttcggagaaagaggaaaaccctaatcccctctttctctcggatcatcaacaagaaaaaaaaaaaaattataaatgaaaatgaggaagctttgtccaaatttggacagagaagacgggttagagacggtgttagaggttccggtgccggaagaaatgtttacaaagatgggaagcaacgcccaagggcggtggaggaatatgcacgctctcatgaaggcacacgccgttgtgaccgcggtggcgactgatgtaagaacgccggcgtcatcgtcatcgatgagtaatgtcaacatgcatttgcagtcaaaatcagacaacgagtttgtggccttgttgaaaatcgtaggaagtcctcttattccttttcatgtcccgctcgagttttgtctatcccgaccaatcaacgacacttccatcgtacgtatcttatcattaattcaatctattgatttttgtttaaccttttgatgaagtggggtta

SEQ ID NO: 28150 - DNA, 698 bp, Arabidopsis thaliana columbia
cgagaggatcccacaaaattttaattgcatatataataacatttgcatgcaatttggatttgcggccacagaagaagttctcaacagctctcagcctctcgtacgttcaacaactcaagtgtttcaaacttagatgagaatcgtgattgcggaatcagaaggaaacaactttatcagaaataagaatacattcaaacaaacttacatactagctaggagaccgatatcagaacaaaatgcttcggaaaactctcgacatgcttacattctaacataggtctgactactacgagatataaaacgagtcaaatctaagaaattaaacaaatcaagagattaagggcggtcggtatcttgcttcgattcttcacctttctgctctcctctaatgcttccagagtactaaaaaaaataatcaataagatacgtacgttaacgttaaagtactatcgttagtgtatttcacacaactatttaaacttttacgatataataaagttgtaaatgttaacaaattctatcatccaaatatatatgtcgaactgtttctgatcagaagttaagactattgttgaaacgaaaagtacttggaaatgatgaagaaggtaggaggactaaatgactaatagggtggttcggtggcaagttcctttggtgcgttacactgaaacactctgaccatgcttgcgaagttatgt

SEQ ID NO: 28151 - DNA, 531 bp, Arabidopsis thaliana
cggcactcttctctcggatccttccatggtatgattctgttttttctcgtgacttgcgtgtttagatgctcaccattggagctcgctaactgcaattcctatatgttgattttgaaacttgtatcatccacttttgatttgattctagaatgttattagcttgagcaaagcaaaatcaattctgaggaagagactcatcagacgaacaactatctagagaagatcaaacattagaacactgatgacgaattgtaacctcaaatgagccaatcattgcacaagaggagtgccacgtgtttggatgtgtgttttggattatccaaactacaaaaaagggaaacactatctaatctcaccaatcacaaaagagaatagtgccacgtggaaaacaaccaccttaccttcacacttcttcttcttctcttcggcagaccatccaaaggccacatcatctctttccaccatgtctgcagcattgagctcgtctctctacatttccccaaagaaaccttcatgtccacaggggatcct

SEQ ID NO: 28152 - DNA, 483 bp, Arabidopsis thaliana columbia
aaaaagaacttgatctaagcaagtctgaaatctcaaatgtaacaaacaaacacccaattggtaacggcgccaaattgataataggtttttaagatcaattatcctaaaacaccaatcatgtcgttgtagtattttaggttgtcaatccaaatgggtgtgatgctaacaacagaaattcaagcaaagacagcaaaacactcgaccaacacagctctttacagagcactgggtgaggtcgagggacaggtcgagtaacagacagacagtataacacagatactcgactgcacagtctgttgccagacaactgggtggtcgagtatgaggtcgagtaacaagaaagaattgcagacgttaagcagcagatgacatgatgcagtaaacaacagtagagtaaacacagaattcaattagatcaagaattcctgaggatggggtaattgagtagtttcgtttcctcagtttacaggtgattgacaagct

SEQ ID NO: 28153 - DNA, 590 bp, Arabidopsis thaliana columbia
gatcctcctgagaatcctaatctattcaagtaagcaaattctcatcctttttactcaattcgatttgggtttctgtttttgattactcaataatgggtttctgtcactgttgtacttaggtgataatatcgagttccttaatgaagacaaagatggcgagggagaagaggaagaagtttaaatttgctgttaatttgtttttggatttgatactttgttgaatacttgaattgtgtttaaatttgcttttggatttgatatttaaatcaactaatactttgttatttaaatttgcttctcgatttgataatttgattggaatataaagcaaatactattgtgttaaaatttggttctgttatgcccattggacaacccatttggacatgggcattaatgggcatggacattaatggacatgggctttaatggacatgaacactatttgtcaaatatcgaaatggacattattggactgggctaatggacatggacaacccgctttgacagctctagctcgatggttttagagtagtatagtttgaaagcccaagacactctcatctgcaaacgattagatgaataattgg

SEQ ID NO: 28154 - DNA, 884 bp, Arabidopsis thaliana columbia
cgaagaggatgagctgagtgcaatacggcacatgtccattaacgcccgtgcccattaatgtccatgtccaaatggggttgtccaataggcataacaaaaccaaattttaacacaatagtatttgcttcagcaagatgcttgaatgtttctttgtaaataatcgctctagagagcattagatgtgtagaattccattttgtgcttactaccaattcttttttctgtttaagtaactcatattagtgagctaagcttttgatatttgcagtttcatgaatacacggtgtcaaaggaccaagcttcatagttcatactatgcataatgcagacaatgaacactatatcaaacaatagtaacagaaatcgaaagagacccatgtcaaaatcactctcaataagcaaaaaacagtaacaaaaaatcatttcgaattgagtaatcaaaaacccagatcgaattgagtaaaaatgacgagaatttgcttacttgaactggattaggaatctcaggaggatccatgatgtgatggagttgagatgttgaaggaactcgccggagaaatcgccggaaagaagaaatcgccaaataagcgtcggggaaatgttttttccccaaatttatttttgcccgaacacttaaacctaatattttttgaccattgggccgcccatgtccatcacgtccagtccgctgatgcccatgtccgttaacgcccatgtccattaatgcctgcttcataatgggcttgtccatgcccggtccattaggcgttggacacgggctactcgtccattttgataactctactacagatcaatcgttcaaagaaataataaaatctcagtagacctatgtttggaagaaacaagaaaatttcatagatccg

SEQ ID NO: 28155 - DNA, 1056 bp, Arabidopsis thaliana columbia
ccttcgctttgaagatagtgttaggcataagccataccaacgttgtgaccgttctatgaaaatttagtataatgttttagcgcgtataatttagtataaaactcctttgatgatcattctcgtgactcttttgatatttagcgccaacatggttttagttagcaccggaaaattaatgcaaagaacactcgaagaatctaactagatgtttagaacaaatgtaggtgaggaacgatcataaacaataacaaagcatgaacagtaatgaccgtggcatgaaaattgagaagcaaatttggaagacaagatatatatcttctagagaggtaatgacaatgtatagagctgtcaaagcgggttgtccatgcccataagcccaatccattaatgtctattttgatattggacaaatgaaggtcatgtccactaagacccatgtccattaacgctcatgtccaaatgggttgttcagtggacatgacataacagaatcaaattttaacacaatagtatttgcttcatattttaatcaatacaaaagtcaaaagtctaacactttgaaattatcaatctaaaagcaaatttaaacaacaaagtattaaatgatttaagtatcaatcaatccaaaagtcaaaaatctaacactttgaaatgtttttcgatgattagtgtttttctgttttgctacaaatcacttaacctaatattttatgactattggatcgttcatgtccatcacgtccagtccgctaaagcccatgtccgttaatgaccatgaccattaatgcccgcttcataatgggtttgtccatgaccagtccattaagcattggacacgggccgcccgtccattttgacagctcttacaatgtacaagacaaaatggtgtttccaggactttatttgtgtgacgaatgatgaattgtatatttgtttatctttttttattattattgaaaaaacattgtctttactttatatatctatatatttaaggaaatttttcattttaccaaaagaataataggttaatattaaatgctgagatatgttatt

SEQ ID NO: 28156 - DNA, 547 bp, Arabidopsis thaliana columbia
atttgtttaaaatttacttttgcttttgatctttaaggagttggccacgggcgagagtccaaatttcggaaagttgcccgaatgcatggacaattaaccttaagtgcccaaaacacaatagattatcaaggggcaaagatgggcaagtttaggcatgaacgggcaagtttgggcaccagtgggcaagtttgggcaagaacggccgtgcgcagcggaagtttgccccgccatgcgttgaccgaccgtttaccgcgcctaggacgcgtggctcggctgacttggggcctaagcaaagttaaggtcccaaagtcgaaaactctgcccgaatcgttgcacgcatttcattggttactgagtgagttctggataatggtttaagtttcataattatattctcatgcatccttgattgatttcgtgagttatatgaatcatgtgaatagttacattggattgcatatgtgatctttagattcttctgctattgtttattgttgagaggttgtgttgaggtattgatgattctatgagtgatttacaatatgtt

SEQ ID NO: 28157 - DNA, 413 bp, Arabidopsis thaliana columbia
taaggatcctatataaagtgccttagggacttcacaaaagagatatctttggatactcacaagaaacacataactttatacatattgagaactacgaatggcttgatcccttcacagggtacgtaggcaatccattatggatgcagctatacctttttaaaacccaaccctacatgtatttcagaagagattagaacatcttttgtaatcgagtcttggatagaatacctaatgaagagaaattactagatttgttttccctctctaaacaaatctattgtgtgaatccttggttcaacaattggcgccgtctgtggggacgacaaagaactctcttcacatatcactcatccaagtattcgatgtacgctcatcaagccaagacaatcagatccgtctacttgcagggggaa

SEQ ID NO: 28158 - DNA, 502 bp, Arabidopsis thaliana columbia
cctgttattagccaaatacaagaattaatcacatagacacagtcaaagaatcaataaaacaaagagaaaagaagactgttttggacaatacggcaagcatatgactaaatacgatttttgttagctcttgttattctaaaaatatttctacactgagtgtaactctgattaggcatgatacattaaaaatttggttaagttagatcatgaacatgatttcccaaaccaagaggagacgtgatagacatcatctttgaccctagacataagctagaagaagactagtctattaaaagtagagccattcaaataaagtgaaaattaaccatataaacaagcttcagaactctagagcagcattgaatacgcttctactatcacttaagttagatcctgaacatgatttcctaaaccaagaggagacaggactcacacacaaatcatcttacatatagatctctaaaccaaactccatagaaaccagacatagaaagttaaatat

SEQ ID NO: 28159 - DNA, 553 bp, Arabidopsis thaliana columbia
caaattcttgcttggagtatagtaatgaaagaatcataaacatagcaacggaatttgctaagtggatgacactttttggaaatgtcactaacttagtgagtgaactaaatcacattttagtgcaatatgttatcatagagttacgtgagaatccctatcaaagctaacacttagcccatgatctagttaggctgttatctccaaaatgtgaacaaacacgaagatagctacaattttgtttgtttggtccaattttctcattaaaacctagacttagatctacaatcatcattggaaactacgtacagccaaatgaaaaccatattaatgtaagttgggtgtggcttatatttatgagtgatcgatgaaatcataaatgctttacatagagtagaaattgcttcatgagcagggaatagagaagagatctcatcaaaatcattaaagacttaaagactttggtatatattttgcatgtgggagaaatatcaccttataggcttctcatattaactcgaaaccaatcattatctcccaccacatttatactttg

SEQ ID NO: 28160 - DNA, 459 bp, Arabidopsis thaliana columbia
tatctggtcctttccatttccgttgagttctgactccgttgggtttctgcgtaacagcactagatgtccgttgggatgagactccaggagaaacaaggctagtcactgtgtctacttgtcctctctgctttgtgtccaaagtggcggatgttccgatcttacattctccttcaacgagtcctccgccaaatgtatgcaactctgcaaaagataccataaagactcaaacttttagctagcgacgattgaaactttctgcatttccatagccattaggaacaagcagatcaagaattctttccaatcagaaaccaattgacatcatcacgtaatggcaatgtagcaataggaaacatttcaacaatctcactcgatccactttaagtccattaatagacattgtcaccaatccattcaccaagcacgattaactaattggcacccacagtccatataaag

SEQ ID NO: 28161 - DNA, 383 bp, Arabidopsis thaliana columbia
cgactctcccctgcttcgtatttgtaagcatactgaataacttgtagtgcggtcaattcattgtcgggcctaactggagtattgccttcccgtcctttctctggatccttcaccactattacatcagttggcatattcatcttcttcctagcttcatattcctccaggagtttcgcgtaattagcagcagggtcaggatcgtcgagcatagagtccttgaacttgtcaagactcgctgagaacaacgcagctggtctctcgacatacttgatcactcctcccacgaacgtgattaatgttggagtcgagaagcctatttggtatagacaacaagatcacatacacagtggctaccgcttgacagacaagactagacaagtgtc

SEQ ID NO: 28162 - DNA, 631 bp, Arabidopsis thaliana columbia
ataacgtttaaggagtcacatgatgatcccaggggctaccactcacgggactcactatctccaatcgcaccaccgtcctctgaccctaagaatagcaatggcggtggtggttcaggtgcttgtggtaatgttgaggctcctgctactgctgcttaaccaccgcccaagattaacgatactccttgtaatggcaaagcagcagagcctcctgtcgctaatgtgaaatgcagcagcagatggaatagttgcggtttgatgtaaagtagagatctatttagtagtttaaccagtatcaaggaaactatattatagcaacttcttaaagaatgagttggtagaaattttcagattttctactacacacaattgtcacaaacaatcaatcatgcaaaagaatcatcactactaaaacacaaaataatcctatcttacccttgccgatcagcgtgctgtggtttgagagcagagtgagtcgggtgtcctcttctgccaagtctctttgttggctcggcatgcttcttttatgggccactcgatctggaagccgtctctgttctgcctttctaactggcaacagtgtgtgtgaaacgtctgaggatctacctgagagcctgaagtcaagggtaaacaa

SEQ ID NO: 28163 - DNA, 493 bp, Arabidopsis thaliana columbia
ccaggacttcgaaaaggtacttttggaacgccaataggcatgaaatgaaaaaaaaagagaatgaagttctctatttcactttgatgtggaaacgtaaaattggggtttcgttttttaatactattatccttttttcctactttattaatcatatttaaattaatgatatttaatacataagttgaataagctaaaataaaatataaaataaaagtaaagtaagagagaatgaataaaactaaaggaaattttttacgaacgggcttctgaatgatcaacaacaatagctatcttggttcatagaaaataggattaacccccattgcatattggtacttatcggatatagaatagatccgcttccctttttttctatgaattgaattgttccattattactaacagaatagaacaaatattaatcctttctccgaaataattacctaaaaagggggggtacgtagcatagttttttccaatgcaataaagtaca

SEQ ID NO: 28164 - DNA, 660 bp, Arabidopsis thaliana columbia
cgcatggctgcggagacgaccgcgctgccgtcgccgaacgcctcgcttccttgactcgcgcctggtcgggagttccacgtcattttcttttcatacactaatacacacatcaagcatacatacgaagaatataaaaattgtattaaccggtaaacacacgcatatatccacacgaccacacatcaacgtcatatagaatatacatgcatagccatttatccatgtaacatcacatacacacacatgaatacgtttaacgtttgatctcatacttctcggatttaactcggtttgacgaaagtaaaacaaagtattagaccttggtccaaaatgtagacatcacccctctaataataatgaaaactcatgttatttgggaggagttgtttagagtgattagatccaagaaaatatgtgaacttaattagaaatttcttagatcaaaaaagagggaaaaaaagaagaattgcactctaaactcatacaatataatccaaagtcttttcggttatagattttggtgtacggaacttatctgaaaataaatagataacaagtttgttcgagctacctaaaattagttgattcgaattcaagtcattttaaacattatcacgattttaaaacgcaaataattaagttgagtgccaaatgtatagg

SEQ ID NO: 28165 - DNA, 787 bp, Arabidopsis thaliana columbia
atcccgtctccattctcatccttctcttctctctcttcctcttctcctctccctcctcctcctcccgtcaccaccaccaccacaattccggcgacacttctccggtcaatccttcgtcgtctctcgccgctcagatccgtctcgcttgtaacgcaactcgttacccagaccaatgcgtctcttccctatccgaacagggtcgggttcctccggatcctaaaccaatccagatcattcactcagcgatctcattctcattccaaaacctcaaaaccgcccaatcaaaaatcaagtctattgtagactcgtccgtagggaatctaaaccgtacaaacgccgcgaacacgtgtctccagcttctcacttactccgagcaccgcactcaatcgacggatcaagctttaacacgtggcaaaatcaaagacgctcgagcttggatgagcgctgctctagtgtaccagtacgattcatggtcagcgctcaagtacgtcaacgacacgagccaagtaggtgaaacgatgtcgtttctcgacggacttatccacgtcaccagcaacgcgcttagcatgatggtatcgtacgataacttcggagacaacgtcgcgtcgtggacttacccagcaacggaacgtgacgggttttgggaaaagactgggcctggtttgggcttagatccgagtacagggcttaatttgggttttccttccggtttaaaagaagacgtgacggtgtgtaaagacggaaaatgcggttacaagacggtgcaagacgccgttaacgtgcgccg

SEQ ID NO: 28166 - DNA, 806 bp, Arabidopsis thaliana columbia
ggtctgcggctgatgaagaagacgacaacattgcctccgacgagatctgcttcttcatttctgtggcagttttttttataacatccaacagtactactattttatctagggcttaggtttaagtttttggttttgacttcaatattaattaaaatatatttttgtttttctgtagaaagggctatttataatgttttgttttattttttgaaagtttgttatagttaactctcttctcctccaaataattatcaactcttctcttctcttttgcaatttttttttgaacttctattttttcgtttttttgaacaaaagatgttggtatattttttttggtaaggcaaaaataataataatctggtattatatatgaattcaaatagcattttggaaaggtggaaaaaaaaatcttccgtaggatcttaataaacgtcggacaggcagtgtgtggatatgcccgatattagggttaatggtttacaataaagatcgagtgatcgtatagtacgatgtagaacatcataagattgattagaatatatattctttaattatcttatgatcttctagatccttctatgctcgcttagataaaataataatttcaaaggcattaaaaatcatattcataaggaaacaatattattgggtccgaatcacccaaattgtattggtatatcgaaactgtccatatgttggtttatggcagaaactacgtgtacaccacgttcggtgcgctacgttcttataagttataacccgtcattaacatatttgtgtgtgactctagtttggatacgatg

SEQ ID NO: 28167 - DNA, 530 bp, Arabidopsis thaliana columbia
tgtggttggtactcttttggctgtttctagatggggaatgagtacgtcggtgtcaattctagaagtagcttggaagttgtaatcagtaaccttgaagtatataataatggccatacttctctgactttctgttgatatgtggattggtgtagaaattggatgaacattgacgttattcttgttgcgttgctctcttgaatacaccctccatagtgtgtgatggtctttgacaatcttctttaagatgggttttggattacataattatgccgttactggactctctgtattgttaatagtggattagttagttttttgtaatgtgaaagtggacaattaaatttaaggttatttatattttattcttatcttcttattaagaaacgtagcagacacaaatctgggatttttagtcgactgttattttataggcgttctggaatgccggcgcggaccgaaggatgatgtttattagctagaaaaatcattcattctatatgggtagatctatatatgggccaatagttaag

SEQ ID NO: 28168 - DNA, 512 bp, Arabidopsis thaliana
acagaagtagaagaagaggaaggcacctttcttcgtttaccagaagatgtttcttcctccggaaaacttatccgagcgaatacgctagacttaagattattctcgatctctgctttagtagcagggactggtggctccgatgaaggcggttccgatctcttgcggtggtgatgttggctgcgttcggtttcaccacggtggtggcgatgatctcggcttctgtcttcatcgcgacggtcgcgagtacggtcgtgttcacgatctacgtcttggtgacgtgacctctcacggtcgcgttgccgatctcgttcatcaggataacgctcggattttctcttggagtcgcgagacggggaaatgtttttacgcgtaggcggatgctctggggatagtctcttctccggtcgtctccggcgatcgtaatcgtggattggtggtggaggtgcttgtctctgtaaaacaattgttagcccaaattattataataaaatatgtattgaattcggctcaca

SEQ ID NO: 28169 - DNA, 578 bp, Arabidopsis thaliana columbia
agggaaagtttagttacttccaggaaaagcgcaatgaatgatacaatcagaacaagcaaaacttttgctgtcacgacatttagtcgcgcacgttgttcgtttacattcttccaccgtctttgcactgacgccaaccactaacaaaaccatgatcatcattatcttcatgatactcaccatttttgtttaatagttttgattcaacacaattttgttttaatttgtgatacgtggtgtgtttgtttgacgtacttttctagactataatgggtacttatttatagatttagcaatggttgaattatacataggtttactatgttgttgaatgtttaaatttaaattggaaatttttgttcgaatgagtaatatttactatgttgttgaatttttaaatttaaattggaaatttttgtttgaattaattactacatctttgactatctaaaataaatcatatggtattatctcttattaactatagttgaatataaatgttttatatgttattattgtatatttcgttgaccctattatatagtaagattagaaaatttattaatatcatatatattaat

SEQ ID NO: 28170 - DNA, 446 bp, Arabidopsis thaliana columbia
taatattcaagaagtttgacttcaatatttactcatggagaattaatttgatttcatatggatgaagtaattgatatctcaattaaaaaaaaataatatcttttgatagtgacgacatgtcatgcaaaaagattaaagaattatcccaaaacttgaaagataaactttcgatttttgtccaaacaagatcggataaaaaaaattcttaaaaaagaaagatatcgactatgacaagaaaacctgatcgtcacgtatctagccattttgtgcatcatcagatccattatgtaattaatcaataagaggactgcacagtcggccctaaaaaaatgttatgagttaaacatttcaaaacatgcttgcaaataaactgtgatagcaacattttattaattagttcgataaaacaagtgagtttgggttcatatataattatggttccatta

SEQ ID NO: 28171 - DNA, 463 bp, Arabidopsis thaliana columbia
tcaatttgattatataaaaataaaaatacatttcaaaagaactatttaagcaatagacactcgttagtcatttgacactttacaggtttaaattaatgatctcgtcagagtttgaagtttcaacttaaaatgaaagcatcagagcataaaattcaaccaaaggaacagtgaagtgtttggtatagctaatcaaccaatcaaaaatttaataccccatcgaatagacgatgaagaaaaaactcttgtatgcaatctgatttacaaagagatgaaatcataatggcaaacttataaaaattgaatagagttgcaaaagtgtattcctttctttttcctagtcttctttgtttctaacatgaacaaaccatgaaaacaaaagaaagtaaaaaaaaaaacggatttaagtaatctttgagttaattaacaaaaaaaaaaacaaatgatcccaccactctccactaat

SEQ ID NO: 28172 - DNA, 719 bp, Arabidopsis thaliana columbia
gggcctagttatgggcctgggcttcatcgccagggacaagtcgtatcattcatctgatcatcggtaaggtttcttctaaaattgttggtggtgtccgtgatttgctcaggtaattgattaaacgataaaaagacaaagttattattgaattaaacgttgattaataattttttcagaatgtctcatgtaattttgagttgtctatgcaaacatttcagggaatgataattcgtatataatttatattgtttggtttacagagattaagaggaacaagaaagtttgtaatcactagaataagaataagctgtatatattacaaaaacaactgattaaaagaaaacaacatcaacaacaaggataacatcaaacgacagtaaaagaataacaaacttagacaaaaaaaagaataaaaaacattacaagtttacaacacataatatgcaaacaatagatagatggtatcgtggtcatgtgttgtgtggcagtagctagctatagagcttaattagcttctcatttggaaggtggtggagtgaagaatgggattgttggaatgctggtgggaagattgaatgggaagttgtttgggatagaaattgggaagttagggatattgatttgtgggaagtttgggatattaatgggttgtgctgggtgaggtaaagaaggtatttgtgagcttggtaatggcggaaaccgagttggctgaggaagag

SEQ ID NO: 28173 - DNA, 892 bp, Arabidopsis thaliana columbia
ctgataatatccgcgacaatgatgaagccggtgttaactaccagagggtaaacctttttctttatcatatatttcaactttgcacttcatcatggtcattgcttattatccttattatttttgttttacaggatattgaagaaaatgaaaaacatcgttgcgaactacaggatatgctcaatgaagcaataaataacaatggaaacaaaacgtatctgcatattcttaatcagtataagctcctggtaagtagaataaacagaacagtgccttattttcttgaccatgaagttcttacattacgattcacatttattgttgttttcaacaaatctaggggatgggtaatacggaactacagtttgaaatggcaatgagggaccaaattatttacaaccaaagggaagcccagagaaacctatggaatttgctcatgggtttaggagttgaagagaaacaagtgttcgatctcgctgcaaaacaaggaatcacaatcgaagactggagtagtatagcgttgtttccaggacttccttaccggaaacagacaccgagtttcataccagcaaacatccctttcgtgggccactcatattctaaatcctcctgcactttccagagctatcaagacccttcttcgaaaggacaacaatgggctccaactcctactttatgcagagaagaacaccacagctcttactacttcatgagacaggagccaccagcatttgtcaatcttaggaaaagccacgatggttgggttggtggcagcagaccagcttcacggattgacacaggaggcaatcatcgccgagtctcatatccacaaactgtgaacaattcgtctcctcggatggcctcaggtcctactttttaccagactcctcaaagg

SEQ ID NO: 28174 - DNA, 583 bp, Arabidopsis thaliana columbia
atcattgatatcaaaatgcttttctcagtgcttctctctagcttggtatcattttctatggttggtaagtggacagccttgtagatcagacgtcttagtctttaacccactcatattttggtgcctttatattatagtcctgttgtcttcattcttggtgttacaccttggtgaagtgtagtggtgatacttcttatctgtcaggggtaattgcaatggagtggtgcccaagtgacagctcatatcttctcacctgtgctaaggacaaccgaacgatttgctgggatacaaatacagcagaggtagtgtgaaggaatcaataaaagatacagatttgctgggtccgtgaattagttaactattttccattttgactgagtttgatccaaccataacagattgtggctgagttacctgctggcaacaattggaattttgatgttcattggtaccaaagatacctggagttatatcagcatcttcatttgatgggaaaattggcatctacaatatcgaggtaccttagtagtttgccttcagtaattgtaaatattttgttctatatgaatgaatgtaataatgt

SEQ ID NO: 28175 - DNA, 1490 bp, Arabidopsis thaliana columbia
tagaacaaattttcctgatctctctctcttgaatctccgcgaagaacacagttatggcaaccaccagatcgaagagtttcagtgatcaccagcttaaggaacacctagttaacacacgcgcttccacacgcgccaccgcctctgctctcttcccttcacggtatcaaacactatttctctttctactttccttcttccaaattatttgatgtttcttaacctaagtaagcaacaaataaagagagaaaatactcatttttctgtggaaacaataattaattcccatgaaatggattagcctatagtaggaccttgattataatgaaactgatatgaacatatatatctgaaatttttaactatcactggctcgttggtaaaacaattttgtattttccacttgattaagtacaagatgatattattcccagatctagaaagttcagaaatcagggtttcttctaggactacggattcagatcagttaagttatataatagttgtgtattttatgtattcaatgtcatatatttgctgaattcaaacgcaatggatctgaaaagaaccctttgatgtttgcaaaagtgtattttagttttaagtctgaaaaaacttgtttttgaaaatattaatatagtttattgaagataaatatattcgtacagaaagcataagcaatgtactagtgtacagtgcacaaaaaggcatatgccattaggcgtaaatggataataccaaaacaaatccagttcaggttttgacacgtggtagtttagtaagtttacatacatacccctgtcgaaaactcgcaggtaagagtgttattagcttgacccaaaactcaaatctcaaaactgtaaccaaatcatgatttttcatcttcaatatgaagccacatttagttacatgctgtgtagtccatcttttcgtaacagtgtaacacattatttttcatttatgatatgagtagacatgaggtggctgattttctcatagcgttaatttaagataagaatttggaccgacagctttgaagatatagaaatgttgatggagctgactatgacatatttggtgttacttgattttatttttaatttttaaagaaaaggcatttacggggtcactttttatgaaaaaccaaactttccatctttaataatatactaagacctgataaagaaaaaatctatataaagaccatcttcgtaataattcattctttttggggttgttgtgggtttgtggtggcaatgtctcacctacctagcaacaatctcccacccaacaggaaatttgtttttatttccttgatatgattaataaaattgataccgaaattatcatattaataaattgaggtcggttagatataaaattcgtctgacatattctttttatatccttcctttttaacagtcggagtggacattcctcggcgtatgacaagaacgtggaggatgaattgcatgcaagtgcagtacctgacg

SEQ ID NO: 28176 - DNA, 652 bp, Arabidopsis thaliana columbia
  unsure (1)..(652): unsure at all n locations
ctaaaccgaaaccaactgctgtgcggtttggttgctcccattaacaatagtttggtccaaaaacgattgaaaagacaaacggtagaaaccatatctcactttaacaaactatgagaccaattcttttttcatcaacttatgtaaattttttttattataaatcacttcctaataagtagatatcataaatcgttttatctcgatgaaaacatagtttcttttacgtgatataagcgaccaaattagttattttcttcatctccacatgcacgactattttaaaaaacccagagttgatgtgaatcatatagttacctccaacaatatgaacccatatcacttcacattcgtctaaattaatttctgatatcacttataacgttatgaccgccattgttaaaacctgtaatggttatgattcaatttctcattggtttaatggttcaattggatctttgagaattgagtctggttattgctggttagtggagtggttaaaccggttcagcaaagttgaaggatcagagagtctctaactgcagtggagggtttctgttacttaacaagatctgttgtgaacatcgcttatatctcatctttgtacttntcccttgtcctgtatcaagtgagagagagacagagagagagagat

SEQ ID NO: 28177 - DNA, 822 bp, Arabidopsis thaliana columbia
tctatcttctaacatgatcgaaagtaatctaattgaatcaccgtcacatatcacaatcattggttttttaagtcttagtgatataaatatttccagccttttctgctaaatagatattttggatcagaaatagatcattctctttttttttgtaaattcgaaaatagatatttacgatcgtcttagataattttgggtcagtgggtagcgataactttatagcatacgagagggactaaatcccttttgtggacaacaccatttcctatttactagactacgtatcctagtctttaacccactctatataagattagacttttagagtcatgtattatgagttctaaaatccctaatgcaaaaacacaatatcaaatccctatttttatttctcattaaactgactgctgagaaatgtagaatctaaaatattattctgtattcatgacaaaaagaaggacgagaatgagtgatgtggatctggtcgttgtatacagagaaaccatgtgatgcaaacaacatatgatgtggagatatactcccccaaaactgtgtcattttgatctcagacacacgctggtgatttaaataattaaaacccataagcttagaacaactgcgtatttatagctcctcagatccctccgacggctgcgtcactccaccggaaacgctcctcttcaccttttctttcacagttccgccgtatcactcaccacttctgccgctgatctagcagcttcctccaccgtcgctttctatgctcaaagctcctcgtcgccgcctctttcatattttcaccggctcccatcggcgcatcat

SEQ ID NO: 28178 - DNA, 562 bp, Arabidopsis thaliana columbia
tttatattttgctttcatccacaactcatttagattttaaatggttctacctgtccaagcatacaaaactgtctacagatcagattgttttttatttaccattcacaaactatagttcgtaatggtgcagatccaaaaaaataaaagaaaaccgctgcgaactaactgcgaaccgtctttaaactaaattcgtagcagtttgttgcatgtcccaaaaataatatagactggaccgcaattaggttttgaatggatgttgtggttagtgcggactaatccgtcaacagtcgaatctatactatatttggagtgaaaacaaatcgctacaaattagtttaaagtcggtccgcaacaattttcttttatttttttaggtccgcaccactatatactatatataatttacgaataataaataaaaagcaatccaatctattgacggttctatccagttagaccaccgtaaccattccaaactttagtatactatctaatttaaactcaataaatatataaaagccacaatacaacaaaataaatactataagttccgtccaatttt

SEQ ID NO: 28179 - DNA, 691 bp, Arabidopsis thaliana columbia
tggtatataactactatacaacactatattttgcttcttagtatcgatagaaatgttgcttaattagctataatgtttgcagagatgccaagccatcgcaaggcgactaggcaagctttcgagaccaacatatatgtccgatccgatgtcaagcctatcaaagttagttttctattagtattgattgtctcatgatatgttgttgttgatgcttgaatctttttttgttagttctcaatgatttgtcatttttacattttaggatcatgtgaggcctattcgtgaatatcagttcattcctgagctgccatcttcgaggactgatcattcggaacgagtttctccgtcacatcattttggagttccacttgatggttcggttatgagggtttcagctgtgtctgctggacatcgggatgactataaaatttcacctcagataccaaatttgaatcttgcaactcatcaagggaagccggggcatgtctattcgcctaacttggtcgaatatgactcaccgtatcagaaaagctacatggatactgctgcacaagttcatgatgatccttttgtgaaatcagagagagaagttggtaatgaggatgaggatgatgatgccctgcaattagagagacaccgcaaggtttgtaaacgaggttttcgtgcgaattttttgtattgtataaatagc

SEQ ID NO: 28180 - DNA, 220 bp, Arabidopsis thaliana columbia
ataactgcagctctctccatttgacacatgtcgtaagtctcagatactattcttctactattctttttctctttatccacatttacgtccaaacaacgcaataatagttctgaacaaatcattattcttccgcatctgtccaacgatcactagcgtactccgagcaaacaacataccttatacgttaaatctcaaaacgaccaagtacgagcggaacagc

SEQ ID NO: 28181 - DNA, 535 bp, Arabidopsis thaliana columbia
gatccaaagtgaagtaacaaatttgaaatttgttctcgacaaaatcgctaaaccctaaacctattctctaagccctaatcctattctctaatcccaagtatctaaacgtaattcccccacatcaccataagatacgagattcgatttctccacattaagcaaggaagattgttgcagaccttgatgtgtagggtgagcggctgcggtcgcgcctggtacgacggctgctacgatgagtcacaggcgagcgagagtaccgtcggcggtgagacggcgacctagatcgcgagtcgtttcgagccattttcaccaccgcaattatttgattggtcaaattgatttctctctttcggagcttttttatgcgactgctctcgtacgatttatcgatcggttcaatattttgttaaccggacagacgcaagttgaaccgaccttgtttgcggtttaattcaaaaaaaaattatcctaattaattagggttaatgaataaatttatctttctaaaaatgggattttctttacttatgctttg

SEQ ID NO: 28182 - DNA, 793 bp, Arabidopsis thaliana columbia
catatgtattaactgaatgaatacgccccaagtgcaaatcacagatcacagaggttcaattaattagattctattctaacacattccatattcctagttccaaaaagctgataagatcatagtaactaacaacacaaactcaaacaaaaaggaagttttatttatggattgcaacgcatcaatcaaaccacattaacttgagacagagattctagtcatccacaatccatcttcttacttctaaacagctgatacgatcaaagattctaagttatatcaatacaataacaagctaaaacacagattcaaacaaaaagcaagcattgttttcatatcacaaaggatcaatcaaactacactttttcttgagacgtagattctaatcctacacaatccaccttcctagttttaaacagctgataagatcttacattctaacaatacggtaccgcgccaaaacacagattcgaaccaaaaacaaactgtacatacggataaagaaaggttaaatcaaattgcattttaactgaaaacagagattccaaaatccatcttcttagttacaaacaactaatcaaacaattctgagccaaaaacaaagtcaagaaacgagctttaaacaatccaccttcctagttttaaacagctgataagattttacattctatcgatacggtaccgcgccaaaacacagattcgaacaaaaaaaaactttcggggatcttacatcctaacgatacagtaccaagctttaaacaatccccttcctagttttaacacagattcgaaaaag

SEQ ID NO: 28183 - DNA, 553 bp, Arabidopsis thaliana columbia
  unsure (1)..(553): unsure at all n locations
aaaagaataataacccacagaagggtacattcttcgtcatctaccacctaagtttcccttctaatcatctcagtgaggtccatcacctggtttctgtacattgcccttgtgttctttttctggctgtgatacttcttttggggagagtttagtagattgatcttcttgggttttggttggagcattccctgaaggtttcttggtttccaaaacaatttcttttattgtctcttcgatttttcccagtctctgtctcatctccattagctcttcgtgagacttggttgctgcctctacttgtaatgccttttgttcagcttcttctttctctttcttttcttcttctttccttttcttctctccaagttcctgagaattagtccaatatcatgaggcatatgctaacaataaccagaatgaagacagaggataaacattaagacatgactgaaacatcatcagaaactcatatgagtttgataatgaacaataaggagacncacagcatccatgatcttcattttccggcgagcatattgagcaaccagataca

SEQ ID NO: 28184 - DNA, 612 bp, Arabidopsis thaliana columbia
taccttactcctcctttctcatttcctgcgcgtggatattctctgaaaagcgtatcttcttctctctcgcctctctctgaaattaacttcgctagggttttgattttgtgtgtatttcaattcttgcaaaaacattccaattcagcaaaaccccaaaatctgggtaaacaacaattcggttatggattctcgagattcgttatcatccgacgccgttagagatgcgtcgtcactctccgacgacgcagctgttctctctgtaacctctacactcgctaaaaccgctctttcctatttccaatctggaaaattcgaagagtgtatcgacgttttgattcagcttgatcagatgaaacataacgatcccaaggttcagttttttttttcttcctcttctttggattcaatagttttgattttgcctttctacaagtttttgtttgattcttacatgtttagatcgatactatgaataaagaagttaagtttgacttgatatagatttttactaagtttagatctgacttatccgaagttattgattttgttctgctcaagtagttcgaagtagactagggttattgacaaagcttcattttcagtgatggatta

SEQ ID NO: 28185 - DNA, 584 bp, Arabidopsis thaliana columbia
tgtaatatgtcatatctatgacctaagaaactattgagaattaatgataatatagcttatatacttgggacgtacatgtagcgcattaggataagatcacaatgatttatttatctaaatcaatctattagttgtgcgtttacttccgcgatcaagctaatccgaagtagatgtcaattaccaaaaagaacttcaaatgaaaatcgaaccaagaaaataaacgaattgacatatacctataccattgtaatgtaatataaattaaggtttgttgttggaattaacaaacaaaataaataaataaaaatacaagtcaagagcatgcatgctgttgtagatgcggagactcgtctccatcattcacttgacacatgcacacattactgaacttcgaacacctaatccaaacaaaactccattcgtgttatgttccaaatgctcacacacaacctcatgcttattacacgtgaatgccatgcaaatgtcctatctcctccataaatatattcattcccactttcacttcacttcatccatccatcactcgccaaaaaccttgaaacctttaaaaaatcgaaactatg

SEQ ID NO: 28186 - DNA, 693 bp, Arabidopsis thaliana columbia
ccccttagtcaaaagaaaaaaaccgtgtgtcctaaagttgtgttagttaataactgtaacagttagatctggctattattagtatatatgagcaacatcagtttgtatcaaaatttcaagttggaagaaaagtcttcccacgacgaacactttcctcgacatatctcaaacacagatgtacgtgttttaagccaaccaaacacgagaaataattatctagtttataattaactgaattacctgtcttaaaacaaacaaaaaaagagtatcatctaaagttgtgttagctaattattcttttgttctctcttatcatcttctcttctttttctttattttcatgacttttgataaatattcctattatgtttttcatataagaaaaaaataaatagttaaatacaaaaagaatatgtcaagagtgggatttgaacccacgccctttcggaccagtacctgaaactggcgccttagaccaactcggccatcttgactttttaataactgaaatcagacatatttatatcaaaacatattacaaatattaaacactttccactgtgcttgaagaaccctaaattcgaaatttttaattccgaggcacaatttctccatcggtaaggtgggtgatgtgagaatgaaaacgttaatctcttcttctctttctcacaaatcccaatgtttgactatttg

SEQ ID NO: 28187 - DNA, 462 bp, Arabidopsis thaliana columbia
tctatgtaagtatatttgtattcgaatattgatcaatcactttaccaaaataaaacatttgaacgtacgatcagaaaagtttaagtcatagacctcaacgaaaagtaaaaacgaaaaagttactgtacattattttctgagattcttattattgattcctaagcataattaagctataaattatatgctattagactattaaataacccaatgttttatcaataagtagaatccttcaactcttctaatttataaatggccttttgatctaaactaatgtctagcacaaaaaaagaataataataataattgttttggtgacacagaaataatattccacgaacctgtctatgttgaaccgtgtaaggtcgaataactcgatttacatattattacatacaaagtttaagactaccacgtcgataatgtgcctccacgaaactctctttatataaccactta

SEQ ID NO: 28188 - DNA, 791 bp, Arabidopsis thaliana columbia
caaaataataaatcctttccatcaagcttaaagcagatacattggcaaaatctaacaggatatacattcaactggtgaacaaagattcattaccgcatagtctcgttcggtgagatgcctgacgatccaggaattgaatacgaaggggatgcttcttgatataaactgcctacctagaattccaaaattcaatccagaatcaaggaaaaacacactaattagaagctcttaatgcaaaagagagcttctcagaaaaagtaagaaacacagaatgaagacgaacttagtgaaaacttgaaaatgcgcgagagattaacgttgttgtcactattggtagccattttgtttggagatgcaaaactcaaagtccctcgctgggttaacgacgattcaattgcagcaccaatccaagtaactttgatcccaaaaagaacatgataataacattaagcaatcttatcacaaattcaaaaaaaaataattgggtttttagggttttgatttggggattttttataaatgggtaagaaaaataaaaatgaatgtcagatgtgggatttgaacccacgccctctctcgaagaccagaacttgagtctggcgccttagaccactcggccaacctgactcgttgatattattatgagtttttaatttatattcccttacaaatatgacctgtgaattttttttccttttctaaacttaaagttcttgcaacaagccaaagtatacatgaaggaacattgcactcacgtaccaataataactccacaacatattaagatcaga

SEQ ID NO: 28189 - DNA, 927 bp, Arabidopsis thaliana columbia
gtccccatataactctctagtatttattagcctatattgctcatacagtaactcttgcattactgcataccacaacatagatggctttcgaaaatgaaaaaaaaaactttacacaaggaatatataacacaaatcttgaaaattagggagtttattcaaaatgttcttcttcagcgagggcttgatgtaacacaaaggaagaaattgccggcgataatttcttataaattagggtttccatgaggacgctgtagtcatttggcacttttttaatacaaaagaattctttaaaatagtaaaatatttgacagctgtgggatttgaacccacgccctttcggaccagagcctaaatctggcgccttagaccactcggccaaactatcatttttaataactgttaacttgtaatatgatttatcacaaaaacaaccattgcataaaggccttaaaagaaagcctttttctaataaatgatttgggtaaaaaatttggaatttctacttgttcggttgaaaaaactcttcctgatttaatgaaacaaaactaaatattataattaccaaaatggtcctctctaagtttaatacagtttggattaaaaacaaatttttggaactaataatttactacactgaagttgaattaaattcggtttccctgcaatttcgatatgattacagtgtaaaaatgtatatgaaatttataaccaagtttatgagtagaacaaactttttcactatataaacaagaataaaaacaacgtttgattaattgtaaaagaaggcaaagcttacaaccctctttatgtgaagatcataaattattacatcttgagattaaacaaaagatttataatttcatatgcagtaattcaaattagttttatccataatcatatttattgtcttagggtatcagtattagt

SEQ ID NO: 28190 - DNA, 773 bp, Arabidopsis thaliana columbia
aactggggtttattttattcatcataatgattatggcgctacctttttcttagcttatgagctacgttcatgtacaagttatacatatataacacgttccaagaaaaattgtaagagaaataactttaatcgcaattttatagaactcaccaaactatcatctataacgagttaacatgttgccagtttgaatcaagaagcttggatgatgaatgaatggatcggtttgtggtacaattcttaaaattgtagtagaggagacagagaaaaaacatgataagactttggtatttacaacttgacggagacaagacagtaagccaaatctgtcacaaaaacactcaaactcttttctcagtgttttgagtttaaagagagacttattcacttcccctttcgtaacacttatttgtctcccaaccaaacagtttctgtcctttcccttgtcctcccacgtgcatctttatatctcatgacttttcgtttctagatcttgaataatgtcttagtggattaggtttgttgtcggtaaattaggtgaccgtttttttcttatatttggaagatcgcgggatgaagcagatactgagtttcagggcatacacacctaatttgaaaatcattgttagtccaatttcactttaatcttgtttacaaaaaaattgatctgaaaatgttgatgggataagtaaaatgtaagttttgctagtagtcatgatataataatagcaaaactagatcaattttgagcaaaaggaagaacaaaaaccaga

SEQ ID NO: 28191 - DNA, 743 bp, Arabidopsis thaliana columbia
tgtcgttcactcagtatctatcgtcaatgcccttacaaaacgcatgcacaaaaattacgaacaaatcaatgacccctcagtgacagagagaccaatcaaaatcgctttatttatttatctggtgaactcattgtgctcttcatacataaaaaaaagagttttatatattgagaaaagaaaagtttactacctacacgtggaaaacgtagagggaagtcgactttatggatgattagaaaaaggtgtagaaaaattgcaacaggtcttgaatctttctttaattgagtaaaaaaaacgtaggaaaatgttttggaaccgtgaaaattacgaaagagagagaggcagtcatattatagcagattaggagacaataataaagatatatagagagaggcaaggccagttatggtagataattagttccaaaccatgcatctctgtaaccatggatggatggatggatgatacgaacgaaaacggcctagtagagaaaagaaagagatttttgtcttttccggcaagcgagaggactcttctcctgaggggcaatgtgggaagaagaaagctaaatgatatggccacaacagacatcgatcgaaggacttgttctcctcactttcctccaacttaattatatgtttttaagttatggtttagtcaataattacgatggagtcgagtcgagttgagtttgtccctgcccccccctacctatatttaaacatcatccatgcctagagctt

SEQ ID NO: 28192 - DNA, 984 bp, Arabidopsis thaliana columbia
ccagcgaattttatttccttctcaacagaggaaatcaagccaatattctgatccttgtctcttttatgtttttttgatgagtttgcctttagataggttcactagattcaattgtgattcgtttttaatttgttgggtcttttttatgattaaactataagattggtattaaggagaatggaggtgatgacaatttccccaaatgatcgaatcagattatactaagcgatttttatttccttctcaacagaggaaatcaagccaatgttctgatccttctcctaaaccttttttaataatagcttcgattatttttctagaataatttgaggttttagatttttttttgttttgggtttattaggtatatgatgatactaaactgagacaaatggatttaagtttggactgatttggatttgatgaattgaaacacatatctacaagctgtattgacaagacgaaacctttgttcatatcataagagatgatagtaatcggatgacgaaatcattcttcatatcataagagacgactgtaatttgattaacttatactgttgaatgctagctaaatcggaatcgtataacttactcagttaatcaaatatcaaaggactgaagcttattttgtagtaaaaattcgccagaataatttacttcaataaccggagtagctaaactaaatttttattatgcaccctccataccggttataacctgtaaaacgaatcgattacctaaatgtctgaaaatataacgcgccattgctaaacaaaacgcaaagcagcaaaaactcgattacacttacaatgataagttatacgacgtcgttttccattcacgtcttcatcaccttcaatagtttatatagccgcggtcagtagcccgtcacggcgaaatctacttatcgacatacgaccggagaattttaatccggagatggagacatatctgaagaacaagaagttgacagctttaggat

SEQ ID NO: 28193 - DNA, 480 bp, Arabidopsis thaliana
gaaaacagcaaagcctgtagttataataactctgccaaaactcaaaagtacactcaaccgaaaaataacttaatagaagtgacttattgtaatagatagcacatgcttataaagagattcaagcagtccaacccgttaggaagttgtggaacctttgatttgagctaaattcttcttgacaaggatccagaaaccagggcggtcataatccccttacacagtcactactggccttgtcgaccctgaccatcattgtacccaccaccataaccttgtgacgggtcagatcgccaagatccatcaccataaccacctcccatgtagccaccactaccagggttgtttgaaccgccaccactaggacgccctccaaccacaccatatgcagcttgatttccataaccagaatcacttccactgtaccctccataaccgtagccttggttactatagccagatggtgactgcgtaggaggagct

SEQ ID NO: 28194 - DNA, 887 bp, Arabidopsis thaliana columbia
gttataatgcaaaaataaaagcaacaacaaagttctctgtataaataatagcgaatgatagaaattactgaaaataatatcaaatacagtacttcttgctgggtgttgttgtgtatatttcttccataacacacataactttctttattaatgatatacatgcagcttcccgaatctatgaagcatagtcaagcggatttgtatctagaaacatatcaagttttggacttagaaatgagccgtttacgcgaaattcaaagatggcaatcgtcggcttcagctaaagtgcggtgtatatccttcctcgtccaactcgttttatataaattcctgtatcagaaataatgtgcgtatattctctgtctgtgcagttagctgctgacatgcagcggttttccagacctgaacggcggatcaatggtcccacagtcacacatctttggtgggttataactcttattttgtgttttgtattagatccttggatgattaactttcctcgtgtatatagtttaactgtgattttacttaatataggtcaatgctaaagttgcttgacgtcttggttcagctggatcatcttaaaaatgctaaagctagcattcctaatgatttctcttggtataagaggtgaaagatataatacttttatctttcctatctatattttctgcaaataggacacttgaatgtaggtagatcgatgtttgttactaatcctttcagctactaaagctctatttaagagttgaattagttcctagaagcttttttttttagtttatgttcttaagatagtttcctcttttcagaacattcactcaagtcagtgcgcagtggcaagatacagatacaatgagagaagagttagacgacttgcaggtgtt

SEQ ID NO: 28195 - DNA, 1056 bp, Arabidopsis thaliana columbia
atgcttaatcttattccacgggcaggtatggttcgtatcttttaaacatgatggatgatttcaaagctacattatcacaatgggtttagtgaacaaattgaggcttttcaagtggtgagagcaaaacatacctgtcctcttttacagttgaagtaggtttctcttaggccaacacactcactcggtatacatgggcttttttcaccagtgcagtccctaattgatcgtttctcgccctataacacaatcagaaaacaaatgaagtgaactggtaattagttaacaggtaatgaatacacttataatagcttcatcttcagacattttatattaccttgacacaaatcgattcactgagacatttgacaagctcttcagcaaggcccttacaagacttcgccatttcaactgttcatatgcaaaaaggcaaccaatacatgagagcatgtttctaacaaatgaaatgagctttcaggatattgtgatgctaaactgcagtgtgtcaaggatttattatgaagatacaagaagatatgggatctacagtaagcaatcaacaaatgcatagtccaggaatctcgccaaaaggcaaccaatgaatcagagcatgttcttaacaaattagttttcgaggtactacaaagcttcaccgcagagcctcaaaagggagtgttgtgaagaaaaatgagctctagtataatactcaacaagtacacatcatctgaaaatccctccaaacacacgaacaactgcccacgtgtgtaagtaactatgaatggtttcacttagtagaaatcacaagtatcaagcatcgaactcaaaacaacaaattgcagttgagcttcacaaaagaagaaagctttgcttttgcctattgggaacaatccaaaagtcccgtttcaataaacataaaatacttcctttcttcatttgatgatcacgaagaatctaaagaactcccctttctaagaatctcaaacttatgataaatccttggaaaaaatccgatttctcacaggaaaatatttctctttcaatcacagataaaccatctga

SEQ ID NO: 28196 - DNA, 479 bp, Arabidopsis thaliana columbia
  unsure (1)..(479): unsure at all n locations
cctttttgttagttaattagttatacactggccctgttttttgattgatcgctaagtcagctacctgcgatctaaaaaaagctctcatctctctttcactttcatttctcctctctttcatctctgccgcagtgactgtaattcggccattccgtagacgctggaatttttagcgtctcaaattctctttctcctatctcttcagatctatcgctgcgactctttcattcatctcaccttcatctctccttcttttttcttttatattttgtgccgccggtgcttgtcgcagcaatcaacaaaaaaacagggtaagtatataaacttacatgtaataaattatatttttataattaatggggtcacttgaccccttctttcttaataggtccgccggtgtgcgtaagtaggagattcatttgattaattaatgaatatagaagttcagaagtgganattattacgagtgtctcgcgaag

SEQ ID NO: 28197 - DNA, 481 bp, Arabidopsis thaliana columbia
cgtcagctacctgcgatctaaaaaaagctttcatctctctttcactttcatttcttctctctttcatctctgccgcagcgactgtaattcggccattctatagacgctgaaattttcaacgtctcaaattccctttctcctatctcttcagatctatcgctgcgactctttcattcatctcaccttcatctctcattcttttttcttttatattttgtgccgccggtgcttgtcgcagcgatcaacaaaagaacagggtaatagtcaagccattcatcccaaaaaatctaaaatagtagagatgttcatcttaatgaaagtgtagatgttgtttgaacagtactgaagctgttggaacaacagatgagatcgagaataagtctttcttgacgtaacgtagaagctaaaaagccacgtggtgttgtgggccattgttcaagttaagcccaattgtctcgtagagacttcaaacgtgacttga

SEQ ID NO: 28198 - DNA, 703 bp, Arabidopsis thaliana columbia
aaaatgctaaccttagggaaacttattcaaagttggcagcaaacgatgtaagaaatcccccaaaacctaagaaaatatgagattttataaaaaaaaaagattctttgattccgaaatcaatggatttatctgaggtagaatcgtaacaaatttaatccgaaaaagattcgttgacaaaaaatgagagaaacaaaaatttggaaaaatattcatcagtagtagttaagaattttttgctcaaaagtaaatttaaatctgataaagaagggaatatatatttaatttaattatagaagatttggttttactccgctgaatgcgtgtgattatctaaatacatatatagttataaatatttgtttgtttgacattgatagaaataagaaattattttcttatggttgaaaattgctatatttattttaggatttctttagttaaaggtatataccgtatattaatttacttcctatataacacaccaaaaaaaaaaaaattacttctaccctgttcttttgttgatcgctgcgacaagcaccggcggcacaaaatataaaagaaaaaagaaggagagatgaaggtgagatgaatgaaagagtcgcagcgatagatctgaagagataggaaaaagggaatttgagacgctgaaaattccagcgtctacggaatggtcgaattatagttgctgcggcagagatgaaag

SEQ ID NO: 28199 - DNA, 798 bp, Arabidopsis thaliana columbia
ttttttttttccaaatttgattttcatggtttgtaattttgcaatagattttgtgtttcacagagagatagtttacgtgttgttaaaaataatttgtgcaaaatagtgtgcgtgtgttaaatattaaacgatatataataattagaagaaaataaaaagttttgtcgcgattagttatttgatatttaccttgttcttttgtttatcgctgcgacaagcaccgacggtataaaatataaagaaaaaaagaaagagagatgaaggtgagatgaatgaaagagtcgcagcgacagatctgaagagataggagaaagggaatttgagacgctgaaaattccagcgtctacggaatggccgaattacagtcgatgcggcagagatgaaaaaaatgagaaatgaaagtgaaaaagagatgagaactttttttgggtcgcaggtagctgacgcagcaatcaacaaaagaacatggccaacgttttagtagatactactataaaagaaaaaggttgatttaattcattcgtaatttggacttaatttttttttaggaacactaattaatcttatttgccagctgtatgagtggactacaataaactcttgtctataaaccagattttcttcctttttaacgcttccacttacaacaatatatgtaaatatgtaattatgacggggcatacggaaatttaatttttgaagcagattcatcccattagccagctgtattaagtggtaatccaagagttaatttagttgttcagcaaatgcttttagataaaatcaactacttatgcc

SEQ ID NO: 28200 - DNA, 732 bp, Arabidopsis thaliana columbia
tgttgtaaatataaacatataactagacgtgatttgaatttgaatgccttataatctgcagttttattggttttgtgaaacctgaacctttagtttgttttatgcaaatctaaaattgttatcagactttgaattgtgattcttgtcattaactgcagtttttggcttgtatttttctggttttgctaaaatctgcaacgtgttgtctttcacttgtttgctaattgttttgattaacaattgtcttttgcaaaacctgcaacgtctaagtggtttttaattaacaattggctttaaaacaaattgcaattgtttattgaataacgtggagttaacgaaatctggtacttggctttgctttcatttgtgtgtgtgcaaatagaaacattaatcaagtgtaacctgcagtttttctattgataactcacgatactgatctggttttgtgtttatttccagacatgtcgagtgagaacgtcaacttctcaacgtcgctgaggtcaccaactgtgggggtgaaagtgaagttgaaattcagtttggtactctccctccagtgaaagtagcgacacttgaacgtgtgcaaactgcaggcccttaacaatttcaacttccagcggcaaattcagcaggtctccttcccgacaagctcggtgggagctcatctaagatgtggcagaaaaagatgtttttctgcttgataccactgaagctgagccagtacaggcgtaa

SEQ ID NO: 28201 - DNA, 566 bp, Arabidopsis thaliana columbia
ttaatttcatcccctattcatgcaggtttacaatctcaacaataatcgtacaaattccctcaaaatttgcggcaaggaagaattaggagtcggtaatctaaaagcatgtctacgattcaccggactaaacaaccaaatacattcgaaattccattcaatagaacgcagaaaacgaaaacccaaacgatcaaaaattcgcgagtaagagaattcggtgagagagagatgaccttagacaactcgtgaagtgcattttctctgagttcgggattgctgagatcgagaattaactgctccgccgatgatagcttccgatcgttgttggaggaagaagaaggagaagaagctcctgagagggcgacagatttcatggagagcggaggaggaagattagccattagagccccgtcaccgtttacacgcgccgcagagagaatcgctacttgtgacagtgaaaggaggagatgtatttataggacctaaggggggcgtgtatgtcacgtgcctcgcttgctccgttacgggatttgtccaaatctaaatctcacgtgacttgtgaaaaaaaa

SEQ ID NO: 28202 - DNA, 1011 bp, Arabidopsis thaliana columbia
agaggttaaaaacttcagttttttaacaattgtctcatgaattcgtggtatagtgttacttaataacaattataaactgtaaaatataaatattttataaaaataaaatttgcaagttttaatatatattacttttgaaaaataaatcgtcccgcggtataccgcgttaaaatctagtattagtatattatcccattagtgaataaacacttacctagttacataaattataaataactaggaaaacttgcaaaatatataattccaatgtttttaattattttaaatttatgaattttagttggaattcatctcaatttttttcggttttgttgtgttataacgataaaaagcgatttgtgtaattgttatcaaagtataattgttatcaaacgctaataatactaatcgtatgcaaatatagcgtttgtaagtaattgcggaagaaccaatctagtagcctttgacacccgaaacgcctggctacgattacacgcgtttccgaaacgttgggctttgcttagctgcgacattttcagtgaacgaagaaaaccacggtagtagactagtagttgtagaaaaaaacaaaacgaaatcgaagaagaagagaggaaggatgaagaagatcccggtgcttctcatgggctgcggaggcgttggccgccaccttcttcaacacatcgtctcttgccgatcgcttcacgccaaaatggtccttactctctttctcctcacttacttgtgtctccattgctcgatttctcagtaatgaatgaatcctatactaaatgtggtttctgaatcgtcttacttcgattttgccatgcttgtagaggaaaatttcttcatctgcattatcatcctcaccatcatctaggtttttctcgagttgataaaatgttggaagtaatgggaataaggcaaattcgtctagcttagctcacaaattatgaatccgcacttgtatccgtttacagggagtcatatacgggtgattggagtatgtgatag

SEQ ID NO: 28203 - DNA, 921 bp, Arabidopsis thaliana columbia
tcgaagtttatagttactttactcatgcacttgggtatcctttgtactctattagatgtcaaaccaagacttttaatatacagctgctaccctcacaattacatgttaatcctcacagtctgagtaatgtggttcatttaaaatgcagcgtgattcaattttgtgccactgcatttggatattacgctcaagccactgctgcccaggagatatttggccacacattgcagtcccttagaggaattaagtacctttacaagtaagtagaagtggtataacatatagcagtcatatgctatatccgtgatgcgtcttattgaggttttatatttcaggtacaatgtgttccaaatcgggtttgttatcctggctggactgactttcctatattacattgcctttgtaagtcctcgttgatgttactcctcgggttttctcttctgtattaagtatttgtagaatcatatggtctttggtgttttggcagggatggagaagaaaaaaaactagtggccgtttccagctctcttcttaatgtaaaacgttttcacggggatctgattgagtgctgtcgacaaagtttctacttgtttctggatcatcatcgattccagaagtatctagagactctgcttctgaggtttattttcctgaatgtattattaaatttcttgtgagtgtgctgtttggttgcgcaacagttagctgtcctgtcttggtctattgtactgtctcggatgcgatcatgtaatcatattttcttaatgagaagccttcttcgaatttttacaagacagagacttcctttgtggtttgagacaattgtaaccgaacctaaccggattatcaatattcttgaatttgtttagtatgcaaggcatacaactatacaagtggacatgtgctgctgaagtgacaagt

SEQ ID NO: 28204 - DNA, 550 bp, Arabidopsis thaliana columbia
ctgaacaatgtaaagactctgtaactagctagataaatctttccagaataaactaagcaggatatcatcatcaccttctttgatgaattgaagacatctgtgcggtcacatatgtaaaagtataccataagtactgcaaactcaattctgcattaaaaaaaataatttagataatttgggaatcttcaggataatggacctttgaacatacaaaactttactctagaaacggaccccaatactcacattgcccttaaagtcagcctgttctcaaccaagaacgactcatccaagaggacaaacctgcgtagaaccccggcatataagcataagaaaaagaaaaactacagaggtcagtggttgcttcggaagaagtaatggaacctgatgagaggagaatgtgtggtcgggcctttgcgtctaggagaagctgattggagacacctccatcttctattaaaagagctttgtcatcttctttaacaaaatctttcgcaatttcaccaaattgacatcagagtgcgtactacatagacaaaccccaagtgag

SEQ ID NO: 28205 - DNA, 595 bp, Arabidopsis thaliana columbia
tatataaacatatattatttgtaccatattttattacgcacacacatatatatatatataggttgcatgatgacgagtatggctaaagtttttaagtaaggatctatcactttacaacctagaattagctacatggacattgatctcacccattctatatgcatgcttcggtttttgaattcccaccttcaaacctctccttcaacttaagattttgtgtttgcttgagggcaagcaagagatatgtttgggggagttgattgatatgtcctgctttttactgatttctaacatagtttcagaatggtttttagagtctttctagtctttttcgtacgttttgagtcatttcatgtacacttacacatttgggaactatggagcacaataagtaattttggaagcttttcagcaatgaagatcttgaaggacttttttcagaagctggtgtcgatcgacaccacacctgtgtcgatcgacactctaatcgctgccaagggaattctcgttttctaccaagtctttgagaagccctgaagtcttccttatttgcaaagtagtccatgcacgtttttagtgacggaaatacctaatt

SEQ ID NO: 28206 - DNA, 509 bp, Arabidopsis thaliana columbia
cacacgtaaactacatagcataaactaaaataaatttacgaaatgacagaaaatatgaaagaacacttatttgtattgtttttgcattttttacgttttgtttatcattttgtaacttttttttattgatgaagtatttgcgaaactatattgaaaagtattagtctattattaacttaaagtagtataatgacaactgagagaaagtgatgtaaataaagtgtcgttagctcaattggtaaaggttctaggtgaaacttagaggtcgccggttcaaatgacgcttatgacaaaacttatattacatattgtggtttcggatctggggaagttacggacttcggcccagacctcttagtattcgaaaaaaaaaaatgagaaagtgatgcaacttagagtagtatttactttctattttgtcatattatagagctgtagtatatattgattcctacgactgggaaaatttgaaaagaaacagtatggattttgaattaagattctcagct

SEQ ID NO: 28207 - DNA, 702 bp, Arabidopsis thaliana columbia
tttgataactttagcttctttcttaattccaggataatatggtcctaggactaagcatctgtctcacgcttcttgataataaccgtcctcctagtgtttacaagtacgttgcttttataaaaaccttacctcatttctcctatattattattttcttttacttttttgttttactttgtcaaaaataaaatttatggttttgttttttttggtctcctagtactgctgcagctaccttcaggcaagcagttgcattgatttttgatcaagtggtttcggctgagtcccttcctatgcctaaatttggttcgagcagtcaaacagcaaggactggatcagttactggagatttgagtcagaatatcaataattcagggtacgtcagtcctgatcaattctgtctgttgtactcttttatcttaaactttgtactgtctttactgggtaaatatagtattagagctttgtggaattatggttatttttatacacactgggggatgaaatgattacatgccggttgatttgagcttttcctgatgaagtgaaagacataggctctcctttttgaacttacgctttagtcaattggaaccttggcatttggtattatttatttgatagactaatagaattatgaaagcaggcccttggagaaggatgttatcggtggtcgattgacaataagagacaccctgagtg

SEQ ID NO: 28208 - DNA, 545 bp, Arabidopsis thaliana columbia
tgctatacttacatagtctttcagccatccatatttttctgttgaccaatcgcttcttggagtcattatctgccagtagaaccgagcattaaagttgctggtgttcaggccttctttttcactgcagaaaaaaaaagaatgagtaatgatagcacaaaacgtttctatgtgaagaaaaatagacacttacaaatctggttcgagccaatccttcagcctatcaaattggtcatcagaaacaggttgaagatgttcagttaccgaagaagacgatggtacatcagtgattatgcgcttcactgttgaatttcctacagacggatatttctgagaacccgctagctgtggcactcgtctcctcttactagtaataccgtccagattatctagtccttcttgaagtgctctcaatgcatcagtcgttgccttattagccatctgatctagaggattggagaatgtttcttctgaacgtgaagccattttcagattgtctgcattaaccttatcagtgacatccacaacatcatcatcaaacgtctttg

SEQ ID NO: 28209 - DNA, 706 bp, Arabidopsis thaliana columbia
gtcatctcctgagattcactcgatgatagatcgttgccaccactccgttttcctgcgatttctctctcttttttctactcttttcttcttcagacccaagtgtgaggctgcttgtcttctcctccactttctctttcaatccgggtcgatcaagtcttttatcagaagaatcttcgggtttgcttctggacttgatctcttcttccattggcacctcgaaccctagttctttccctaaagattctaggaaatcgccagctataagccggtttaatgtggttgcagccgcttcattcttcttttcttgaccctcttgtatctttccattcattggttgatcttcatcatcttcagaatcatcagagaagatagcctacaagtgaacatgacccaatattaatagatcgaaactatcaaattgagttagcataaactttctcagacaaagacactcgctttaccttgtaaagatcaacaggtctctccacattctccacttctacctcaacttcaggctcttctattgatgtctctttcttaggtacttgcgactcagatacttgacgtgcagatgcagctttcactgtatccggcaagaatacgagagaatccattttgtttctcgctcgcggacgaggtggcagctgtaaaattgaagggaatgtattgatcaacaagtactaaattttcacataacaagaacatg

SEQ ID NO: 28210 - DNA, 651 bp, Arabidopsis thaliana columbia
ccacacgtcatccctcttcttcaagtattgtgcttcacggccaattaagcttggtctgtcagcaatatatttaatgagattatcatggcacacttttccttcttggacaagatcgtggcaacaagactcaatgagggttccatttcaaaaaacaacataaattatatttaatgcacatctaggagtgattttaactagataagtgttccataatgattttgcttcagcttcttcgacagaaaatacaggaacaaacgcacacaccaaagctacaacaatgaatagcgcaataacatgggagcttagcctagccataatttttgtatgcttggaatttaccgacttattcttagtgtatgaaaagaatataatgaagtatgtttttttttttttttggtattctagacatgaaactatgtaaactatttataggtgagtgaatatccaacgtaaataaaagaaatattataaaattaacttgagaaattaatgtgaattttttaacctcttgaaaagttaatcaacaacgtacgttaaaatttatcttttcaatcaatttttagaaatatatatacaaaattaatgcaagtagtgatatcaacttcagcttataaacttatggattaaaatttaaaattatattcaaatttg

SEQ ID NO: 28211 - DNA, 544 bp, Arabidopsis thaliana columbia
cactagattttaaccttttaaagcccttgtttttcatgcatttagcttagtttcaagtctcttttcatgcattcttagtctcttttccttcttttgcacattttgcattgcattgcataacatacttgcatttggagtgttttgcaggtgaattagatacttttggactcaacttggaggtttctaccacaagggatggacagactcgagtccggagcactaaggaagaatttgaagtatactcgacctttatactcgatgtgcatgtcgagtaagtgaagaaaaagtgaatcttgaagatttgcacctactcgaccaagccactcggccaagagccgagcgagtgtgactaagaccaagccactcggcttttctactcggcctagggcgagcggtcctgcgccgactttcttattttgtcttctagcgaattagggcaacctagtatttgctataaatagaccccttccgtttacctaatggatattcctcttttatccgttttgttctagctctttggtgaaaaacctaaatatgtccttta

SEQ ID NO: 28212 - DNA, 695 bp, Arabidopsis thaliana columbia
tctggaaaagattcttcttcggaatctctttatagaacctgaagaagttgttcttgtagtgttttttaaagtttaagctgcagcagagaaagagattaatggggggttgtgaataaataagagaagagagaggaggaggaacaaagaagggagctttatgcagagaaggaaaaaaccctaggactagaggtggtccacaccgcccttagcaacggtcacatgatggaccctaccagtaaacatgaagaaccaaccacagccgttggatgatccaacctggccccaatttgccagcctggcaaattctcaaaatcgcagaacaaatattttacgtagcaccaagaaatataaattaataaacaaagatattggtgaggtcccacgtttcgcttctcatgttctctcaacggtcgtcgatgctgatctgtttacacgacacgtggtgctattcgacagagtatgttcggcgcaacggacggatatattcactaccaaagtcactttttgtgtgaaattcattttaatatggttttattttgttttgtttcctttctaattttacagagttatcacttaattctaaattacgtcccattttaatataattagaaagtaccatgtataatgtgatagtggagaagaatctcttcgttgtaacggttctcaatcaaatatttgttccttaatatatcatg

SEQ ID NO: 28213 - DNA, 932 bp, Arabidopsis thaliana columbia
aactgaaccaatcacccacttaattatattttattattttatgattgtgatataatcatagagagtttacatgaaattatacggactgtgtacatattaaataattgttaatatattttatattatcaaatttttctcttttgaaacatattacctttgatgatttatatgtactagattggctgaatctttctatgaagtcaaagaattgaaaatagttaggtgtttgcagtgttcaaatatcttataaaatattgacatctacgttggtttcttgggtagtagttcactagaatgtattgttgtttgtttcatgaaatgcaaaagtatccgttggttgaaacatattctctgaccaaagctaaattgatgaaaagaactcatatatatattggtggaaaacattctctgactcacatatatgttaataataattggagtactactactatcctacatttataataaaattctttatataaaaaaatcaaatatgaattattgtgttaataccgtatgctatatatatatgtctcaaaatagttttgataactttaaattcatgtacatgggcatacaaatttaactgtgtcatgaatcaatggttggttcgtgatgcgatacatgagttcttgaaatagatctttaaatttcttcgtcaccactctttgaatgtttgtgcatgtgtatcgattgtcgatatccttatatatcattgttgaaagacatttgtaaatttatttttcgttatagattcataaagaatttgtaaggattttatgttgttgagatattctcccatttccacctttacctatttacaaagatttgtacaaattatgggatggcgtagtgatgactgttagcgatgtattcgtgatcatattacaaatcgacgaaaatgtgataaatggatagcacagatttgtgaa

SEQ ID NO: 28214 - DNA, 716 bp, Arabidopsis thaliana columbia
cttgcaaactctttgtacatcattgaatctcgcaggcaaactaatcgattttcctccatagtttcagattctaaattccaaaccaacggatcgaccttcacccattctcttataacgagcataacatgctcttaagcagtcatttatgcagcgtttacggttggtaggaggagaatcaatcaaagtcctgattttttggttatttcaataataaacactaggcctgggcaaaatacccgaatccaaagaactgaactgaacccgacccgaaaagcccgatccgaacccgaacccaaaattttaaaatatccgaacgaatcctaaactttaaaacccaaaaacccgaacccaaatctgattgaacttgaacctgatcaagtacccgaacatatctaaaatatatatacatagaaataatttaatagtaacaatcatatttacaacaacttaattgcctaaatgtttttggattttaacctattttgtatatttttgggtaatttaattatttttgattgattcggataaaaaatactcaaattcttttagaagttgtgtattttcaagtaatttgaatatattttgatacaaaattttgagttttggatactccgggtaaacccgaatccgaacccaaaaaactcgatccgcaccagacccataccgaaagtcttaaaatacccgaacagctcttaaattttttctagtcatgatag

SEQ ID NO: 28215 - DNA, 505 bp, Arabidopsis thaliana columbia
caaggttttaaaatgataatacatacgcacatatatatatagagagagattaaggattcaaatatgttgataaggtcagaattctcttatcaagtagagtaacaaaaagtgatgagaaaacagaagaataaggtgagaaacagaagaatcagggaagaagaagggagaagaagatgaagataaacattgttatgatctatttcgataacgtttccacaatgttaaataagacaactaaagaaaataacatgcttaaactatgggtcatatacaaagcccactaggcccaattcatgatctattaatactcctccattgaaagccaccatgtcctcatggtggaaggaattgaaagtgaaactctcgggcattgatcattgccttgttcgccttagtctcgtgtttagtcttagctctaggatcgattgtaccgccaaaacctgtttagctagagcctctctccttgccctccttatgtgtgaccccaaactgtttccacctactc

SEQ ID NO: 28216 - DNA, 599 bp, Arabidopsis thaliana columbia
gttacacttaaccatagtcatatatatttttataaagataaatgataaccataatttacacaattacactaagcaaacaatcaacggaaaatgttgtttggttgacatggtaaaattgtttgattactgcatcaaatataatgattagaacatgacgaaaagaggacagatgtatgcttatgataagcaaaatataacgttggagacggcacgtaagaatagatgatcgagagtatcaaagtgattgcgtagcttaatttgaccatcacaaccacatgatagtgaaattctccaaataacacgtcactgggatttacgactcaaatgagactttataattaaccagtactgtggctcaattcgaatatcattagtttgaatctcttctgaagataaagaggaatggaatagtttgcatgaaagatgaaatgaaagagcactatgcgtacgaaagccaatagtgtacgtgtaccatccgcgttcagtaaacggccgtttaccgccgtcaacgcgttttctttttccttatactaattgctgaatattcacttcttctccttttgatcatttgttgcattttcactttttatgtaattagt

SEQ ID NO: 28217 - DNA, 995 bp, Arabidopsis thaliana columbia
ctgaggagctgttccttgaaatccaatgtataatactcttatactatcagcagcattatcattcttttcctgagaatctaatccgacttgctcccatgctttcttcgagttggtccaaaacaatgacccatttctggcactttgttcacttgacctaatgtcaccatccttgctttctcggtatcgtttacgttcccatgatttccttctagaaacaacaccatcactagattcttgggaatcagatccatagtaaccagagaaagaccttctgtgactttcttgtctagccactaacaaccgtggaaatggcactgtcgagtcaagccaggaagagcgaggtcttttaccaagtttcttaatggattgtttgttgatttgtgttgagggatcgatcatgagacgtctctttcatgttgtcttttctctaaccttatgatggctctgattaacaaaaataaatcctctcctgcgagcttgtgtaacatgggttcttcttcccctgcgagaatgcatcgccgttggaagctctgagacccaaggattgggagaagcttctagaaattcagtgcccaccaagtgttcgacagaattctcaagagagatgtctgggttttttgttgggtttgcttcagctctcgtggtgatgacttgatggagctcgtgatgctcttggttcttcatcttaggtggttcgtcacttgtatcaccgggaaaaactttgcaaatatttcacggatgcctcgtcgatactcctcttgttgtgcttggagcctttggacgacggaatcgagcttctcttctaacttctcaacgaatcgatcaagtattgcttcaagatctgtgactgtgatggcttgagcagcttgagtagccatgatttcaactctcaatgaaagcaccaattgataagacccaaaatgggctatcaagttaagtaatagaaaggagatgagatagtagaagaattagagatgggaagcagaagattcaga

SEQ ID NO: 28218 - DNA, 601 bp, Arabidopsis thaliana columbia
tatcataaattaataaatttataaatttatcagaatatattatgtatatgtaagaaaagttagtgaaatatgattctagtattgtttgtttttcttaaataatattaagttttgatcaaatattcatttttaatatgtttactgtataaaaaaaagttgtgcctttttttaaaaaaagagaatatgttcttttacttgtatttgtatctaaaaagatgttggttatgacaaataaaacttcttttcatataggaaagttaaaaaaaattacaaattaaccaaatctctctataaattaataattcaacaaattaatatctctataaattaataaaatttcacgttcccgacattattaatttatagaagttttactgtattcctttgtgaatttccttttcataatttaaaactaagttggcaaccttttcatatcataaataagtaaattatttcaaactatttttctggatttttaatctgttcattggagtcatatcaagtcttgcttcgtatgatttgttctcctactcataagagctttgtagacatacttagatttactagactatgaattgtgcaaatcttgtaatgattaatt

SEQ ID NO: 28219 - DNA, 530 bp, Arabidopsis thaliana columbia
catatatatatatatatatatatatgcttgaatatctctaactcattggtcacaaatctattaggaatgacacaaggaaagcgtaaacatccatgtgatcttaaaaatccaagcaaacgagcaccgcctgcaacatgtaataaacctaatggtgccatactatgtggagatttttgcctacatgaaggctacaacataggaaaatgtgtaatgagaagaacaggaaaggcttgcatttgcagccagtgcgaaggttggtgaggggtgcgactgctcgggttctaaattccatcatttatattataaaacataagttagatggccaatcattttctgccacgtcatatttttttaaaaaagggaagtacaataaaaaataatgtaacggaagataaacttcctaaaaataaggcagtttcttttctttgaaagattatattgatattagaacttgttcgtaatctttacaaaaggcaagttaagacaaagtgaaggtacaaagggaagtaccgaaacaccaaaaagttaac

SEQ ID NO: 28220 - DNA, 405 bp, Arabidopsis thaliana columbia
ttttaatcatgaaaatccaaattctgacaacaacgagctaatcgaaatcaaggagctgttgggaatcaaaaagctgcattatatcacattagatggctgagttcctgacatggatgtgtgagctgacatggcacagatgtagcgcttgatgtgacgtgccaagtagccttgctgacttggcgtggtcatcaaagacgaaggtcggttgagaagatatggtgaatatccatccgatcacatatggaaagggataagcttgaagatcaagggagatcctagagattatggtcctggagattagtataagtattctagaggtcggccgtataccgattgagcactctagaatattgtcatacgattgtaaactacccaacctagcaatgagattagaaggcttccgga

SEQ ID NO: 28221 - DNA, 965 bp, Arabidopsis thaliana columbia
agaggatcccaatgtatgggatagcttaagccctgtgagatatataagttgttagggtatcctcatgatggtatcataggttgacgttaacgagagctttagagccaagggtgcgatgagatgatgaaagtagcctaagcttgaggaagggcgtgtactagtactgcctttttattaagtcaatagattaggcgagttttggtgttgtgtagactactagtctattcctctttttggtaaaaacttaattacatgaaagtgatcaaacacactcgtattttaaaggtatttcaaggtttatgttttcaaaatacacatgtaatgaatattatatctaactagcaatatatgtcttgtgttaattttaatagacgaaagtcaccaaacgtaaagagaaccaaagaaataatgtcaagatgagagaaagtactggcacaagcacatgtaaacaagtggttgttggctcaaggatctcccaaaaaatttgggcacacaactcgagaataacggtacggaaccaatctatatattatctttgtagtcggagctttaaaaatctaccaattttatgtgatagtagttaagaatgaaacttatttcgtgaaacttttagtggggatggaagaaattagacaatggaccacatttatgtaaaagctaaaatagttgaaattgaatcgggtgagaaatgctcatcacgtgactccacccacgcctctcttcggtttcctcttttaaaagtttcaactacatcaattaggtatactaattagtattactaggttttaaccgcggtaaaccgcgacaatcggtttatttgatttttatactaaatatttgaataaatttgatattttaacttataaatataaatttttagtgattagtgaagaatctaatatatgattttgatattattgattattgatttcgtgattgaatatagtgtttttagatatggaatg

SEQ ID NO: 28222 - DNA, 960 bp, Arabidopsis thaliana columbia
tcttctttataagagctttgatacatggaaaatattggaaaacaatgtccgaacatataatttcccccccgtaatatagcaaagataacgaaaaggcccgaaaaagtacatttagtttaaaatttggagtagaaaaaaaaacaatagaaaaaatccaatttcctccctcgttcatcggagagctctctttgggctttccaaaaaggtatcacatgacaagtttggcctcaccgtctaaaagttatagagtcatacatttttaacaaaacaaaatagagaaaaacggaaaaaagagggatgcaacatgaggactttccgggaggtcacccatcctagtactactctcgtccaaggacccttaactgcgaagttctgatgggatccgttgcattagtgctggtatgatcgcatgtgttactacatgcaatgtaatcgtatctattcttttttaaagactttatgatccatttgccgtgggtcccaccagctatgtaggataccctatcttctttataagagctttgatacatgcaaaatattggaaaacaatgttcgaacatataattttccccccgtaatatagcaaagatcacgaaaaagcccagaaaagtacatttaggtcaaaatttggagttgaagaaaaacaaaaagaagaattccattttccttcctcattcatcggacgagctctctttgggctttccgaaaaggtatcacatgccatgtttagcctcacggtctaaaagttatagagtcatacatttttaacaagacaatatagagaaaaaccgaaaaagagggatgcaacacgaggactttccgggaggtcacccatcctagtactactctcgcacaaggacccttaactgcggagttctgatgggatccggtgcattagtgctggtatgatcgcatctgttactacatgcaatgtaatcgtatctattcttttttaaagac

SEQ ID NO: 28223 - DNA, 1004 bp, Arabidopsis thaliana columbia
catcattgtacctatcaatttgcataagagatgtctatatatatacctgccagcacggattttcccactctttctctggcgcctcaaatctcttgccctgctagtagcgttgcttgagctgactgaagcagcagaacctctccttgtcctggaataatagcatagaggaaacaagaacttgtaagttaaggtccaaactagttagtaactgtttccctatttaacccacaaaacaactacattatagagaaattgattcctgagaaaagtcttcattctctacccaatgccctacaacttttacgttacgacttgtcaacacgcttgtcccttcaaatgcttaatcaaaaccaaagaaaatgcagaacgtgcctaaatctccttttgaatcgtcagctctcaactagcaggctaaacaatcatgcactaaagtcccacccggaaacttatcactttaccaatacaaaattatatatgttggaatgttcatgcatataatcagatgctggttaatcgaggaggagacaatcagaaaacatgttgaagtcatgagacaaaaaaaacgaacatgagctcctgtttctaaaaacgatcaatacctaattcagctctgttttagattgaaatctgtaagatcagctgagaaaaattccacataaataaagactgcgagagtaagacaaatgcaaggatgtaccccaaagtataggcgctcattccactcaggttgctacttgcttctgaagctgtgtcatcgtcaagatcaacaacagatcgttcctcggatttgagctttgctgcaagcaataatcgtctctgccggacagctagatagcgagtcaaatattttcctaccttttctattgattctttgaattcacttactagaccactagcacactccaaagcagaacttttcaccactgagattctatcatctgctgtatgcaaaaatgcaacccttaaagcctcttcccattccctcgcattgataagcaaactaa

SEQ ID NO: 28224 - DNA, 563 bp, Arabidopsis thaliana
tgttggcaggaccattctgttgattctgttcatcagccatttcgagtggttgctgaggtacaaggttgactgtgtttctcctttctctgattttgcgagctaagcggtcgatattgtcgttgaaaaggaggttctgattgcctgttgatcgagtttgcatatagaagaggtgtacctggatcaagaagataacaagaaaaacacacagttagtaattgaaaaaaaaatggaaaaagaacttgatctaagcaagtctgaaatcttaaatgtaacaaacaaacacccaattggcaacggcgccaaattgataataggtttttagtcaattatcctaaaacaccaatcatgtcgttgtagtattttaggttgtcaatccaaatgggtgtgatactaacaatcaaaatgtgatcagaagtcactaagtcaagccaagcaataacaggtttcggtgtgttctagcagtactaagtgaacatgcagaaaacagaaaatcaaacagaaacagtaaaacacgtcgaccaacacagctcgttgtagagcactaggtgtggtcgagtgagttg

SEQ ID NO: 28225 - DNA, 998 bp, Arabidopsis thaliana columbia
gtaagaccgcaccctgctttgaatttctaattggactatactactttgatcgaaactcgcttatctgacgccattccctatctattagaacctgaactgaatttgaaattatcatgtctatgcattgtttatgaactcatggctaccatatacatacttggatcatcttattcacttcatcaccctctgttaatccaagtagttgtctctcatttttagagcagtttcccatacccttagcctagccttatttcaagccaaagatcatttgtgtgtgattgtgaggtctttttcgattgagcttggtataacgtgttaggtatgagccgacaagagcagtctttcatgtagacctagcctacactttttgggttaggtaggactaggtggagacttgtatttgggattgggattgtgtatggaatgaacggaatgagagtgagaatgaaaagaaaagaaaaaaagaaaaagagtaagagtttagagttctaagggggatgcaaaagtgttaagtctagtaaagggtttggaatgcaaagaagttaggcattgtgattcaaagaaaagggtaaatcgccctatgtgctaagattagaagaaaagccttaagtttgtcaaagtataaaaccgaacgcgctagactcttaaatcgtttcaaagagaaccccttagaacttgaacgaaaaagagagaaagaatgagaaaaagggtagagttaggacatctatgggactgggatcatcttctgagctatcatactatatcattgggtagatgggagtctgttcttgtatgtgtccattgacttttacctttagcattctactgaagctcaatcttttctctgagagtcccctgttactcgaccaaaccattagagggaccatttttgtctcttagcctaagcccgaaatcaagtgagttcataactgataataggtttttaacatcaattaatcctaaagcactattatgtcgttgtagtactgaaggttgtc

SEQ ID NO: 28226 - DNA, 468 bp, Arabidopsis thaliana columbia
cagaaaaaaaaaaccaaaaaaaaaactacacattagtctaaatgatttatggtatattatctttcaccagtttgtttgtttttctgattccattatcgctaatgtggcatttattaatttgtcacactgcaagctctttccatgccttatacgatcacgaacattcataagctgtgggccaactttgagtgcaaaatgggacttcaaaggccctacactacttatagatgaaagtggccatttggtgaggactgtatgactttcgtgtttacccaattttcacattcgtgcttcaaatctatccttgtatgtgtgtgtgcgtcttctctattattccataaaatgcatgaccaaaatcattgatcttttttcccacataacagaaaaaaaaaaaactataaccttgacatgtaacaacttattccttgagatatgttcataagttcatagaaagcagttcgagtaggg

SEQ ID NO: 28227 - DNA, 538 bp, Arabidopsis thaliana columbia
aattagatcacaagaatctctctttcaacttctctcctatgacgaaataatacacaagagaagaagaagaagaagactaaagaagatactgcgataaaaaaaaaaacacaaagtgaatgctgcaaagcaaaaacttgagaagattgtgtaagaagtcattcattatctttcttgcagagaaagttagaagttgaaaagacaaaaaggttagaactttcttagatctttcgatttcttgatttagacccacttttcgaattctgattctcttcatttccattgattttttcttggtttaactctgtttctccagtggtttgacttgttactgaattaaaaattaggttaagattttgatccatttactggtttcgtaggatttttgatctgaagattctgatttgggatctcaaatggagaacgttgatgtgtctaagtacatacacagctctgtgcacaaagctgttgcttctaaagactatgttggtctcagagcaatactgtcttctcttccaaagcctaaagatcggatgtgaga

SEQ ID NO: 28228 - DNA, 523 bp, Arabidopsis thaliana columbia
tttcatcttcagggacagtagtggcctgatcaactctttcacggactgctgtggcggtccggactccagtaggctcctcaacttgaccgaggctccgtagcatcataatgaccgcaaccaagaacacaaggatgtacactgacctaatcccaatcattgagttgataaatcccatgaacgatggtccgttgattttcttcttctctgttcttccttctctatagccctctagaaaccgagacacttgggtcaaatgatcttcctcttgggttatggtctctatacccgtcacctgaatattgtatgttaatacaaagaatttgatgcaatttcggatactgataaaaccattttgtttacctgatcatactcttcatctccatcccacacaacaatcttaggcagatttgtcttcttgtctacatgaaacgagtcaacaaactcttcaaactgcttcacaccgacgtagccaaaaacgaggtcgcggttcgcatgagcagctgctctcaatgctttgtatagt

SEQ ID NO: 28229 - DNA, 586 bp, Arabidopsis thaliana columbia
tagaggatacaggatcccctaaataaatagaaccttttcgttgaagaaaataaataactaacaacaaaaacagacaaacgaaattcatttaagagatttttttttttttcatttgacagaattttaattaaatgggtccatgcatgatttgatgtgcatgaaaagtctttagtcgttagacggttcttgaaggacaatggcattataaatagacgattggtattgcattgatcaaagtataaaataaagatcaagagacaataaatataaaaagagagaaactaagagcatggagaagaagatgaaagaggaggaggaggagccactgagccctatggctcgggcatttcaggagccgagcatcgactgtggtattgtcataaagttcgggtgcaaaaccaagatcaaccctgacgtcattgttgattccttgaagcttaatgttttcaagcatcctcgtttctgcagccttttggtaagcaggataattattattattttctaatgaaggttatacattttttgaaaagtgttattgatttacttaccagcttcttaatacatgtgctccaaatatcttacatat

SEQ ID NO: 28230 - DNA, 497 bp, Arabidopsis thaliana columbia
tttccagctcccttgagtaaaagagaggtcatagcagaaacgctaggtgaccttaagagctctaaaaaacccacaaaggttaaggtctctaaaaaaaaagacaagtatcttctcaaacgaagggatgaagctggtgataagtctgttcagtttggcgaaattgaagcaagttcagaagcttctcatatccagggaattgatggatctttggatggggattttgggctgcagagaagagctccgacgcttcaaactccaatgaaagatgagaagtctgggatcgtcagcatggattttgcctcttcaaatacagctattcctggtaaagaattttcagcttcaaagccctctcttgatgaagaaaagggtctagctgaaaaatcaaaggagagaatggaagaaagagctgctgtacttccagagcatgggaaatctgaagctatggcgagtcttaaacctaaagaagaagctggaacagatcttggatcagctggaag

SEQ ID NO: 28231 - DNA, 754 bp, Arabidopsis thaliana columbia
gtattaactaaggagaagctcaagttagagctaaagttgttaaaacactgaaatttgctgcagagaaagaagaagaagcgtcacaacttgaagaaactcaaaagaatttgaggatgcttaataatggcacaaagaagttgggtcatattttgagtattggcaagactgataagtgtggtcttggatttaaaggaaatccttcaaaatcagatccggtgtttgtttatggtggtaaaatcacgtctgcatcaggaactgtgaaggaaactgcaactgtggcagagattgcatctgatacgagaactgattcgagaactgatacagagactacatccggtacaagaaaagttcaaaaattgcagagtgaacctcgacgagtttttcgaccggtttgtcatcattgtggagttgttgggcatattaggccaagatgtttcagattgttgagggagaaaaatcgattgatgaatgcttatgatgtgagatttcatggtcctaaatgttatcattatggagttcaaggacatatcaagaggaattgtttcaggttcattcgagaatgcagtcatgagggtttaaggcgcaacaaagtatgggttaggaaagatgatttccatgaaagtggggtcctaggcaatcaactccgaatgccaaccggggagaattttataaggtagtttgaccatgttgtgactcaatcaaggggagaatgatgatgtggttggtgatgttgtgttggagttagaactgatga

SEQ ID NO: 28232 - DNA, 747 bp, Arabidopsis thaliana columbia
cggaaaatttgggatatttgttattcgattcgttttaatcgaatacttaattttattatttgctttgatccgaaaatttccgaatatccagaaatacgaatatccggatttttgtgtgatatttgccggatatccgctttgctttgctacatccaaattttttttttaaaaattatttaacatgatttcaaatttcttaccttatggcttacgagtgtgagattgagagcaactggaaattttctggttataaattatgtaaccaaattgagtgataaaaatagtgaaaggtcgaagaaaggaaacagaaatgtcgctcttatatttgatggattggaaactaaaacgacaattttaggataaaatataaaaaataaaacaattttattttaaaaaattccacttctctaataaaaactgtgtcacaaaaaaaacacaggcccaaaggatacaaatacaagcccaaatcccaacatatacaaatgcacaacctatattgcgatatatatatatatatatatatatagatcgaagcgaatatccgactttagaaaaaatagtatttgttatttgcttcggtttttacgattactacatttttctatttgctttgctccaaaatcttacgaatattcggatttttcgaatcaaatcaaatcgaatattgagttaaagcggatcgaacgaatattttgtccaggactagtgaaggttgtggacgttccacgtgtccctagcttattatta

SEQ ID NO: 28233 - DNA, 870 bp, Arabidopsis thaliana columbia
tcactgtcctagcagtctaccacatcaaatggatatcattccaatctcgaacctgtccgtcctatctcaaatggtgaccagaaacgcgagctaaaggcttctaatgcaaacaccgaatcaagcagcttcatttctaaccgagcccatcttaagcttgaggaagaagatgaggaagaggagcctgagcagttattcagaaggtctgtcccctcacattactcaatctcaaatcggagattacaaagttgataatctcataaggttcttggaataaaagatggttatccttgatgctaagactaaggatctatgtgaatatatacttgcagattgcgaaaagggaaagctagagcaaggcctgaggatgaagaagagccatcacctccacaaggattgcctggatcagcaatacataacgaaagacttaaccgtccacttatccgtcctttaccatcagaggaggcatcacgcggtggtgatagccattcgcaatccccacctgttgtgattccaccaccacctgcgaagcacgttgagagggaaaaattcttcaaggagaataaaggtgacggtgccttgggtttaccaggtcatatgcgaggcctttctttgcatagccgtgatggcagcagctcacgcagggaagcgtagacttcagtgactgaaacaaccaaagctctcatcatcatatatatgtattctttcacgcttgtttctttaggttttgttaatttacagatgggaaaaagtttgtgttgtgtgttgctgttatttctctctctctctctctctttctctctccttctacgtctctagtgttgtgaatttagaatgtagcacgatgagatctgattatgtatacgagtaaaa

SEQ ID NO: 28234 - DNA, 538 bp, Arabidopsis thaliana columbia
gtgaatgagtgattatctaaaatgcttgataggattattatttcgcttgcgttttattctaacgaaactttcaggataatagaactggcaagtgcatattttaaaaatgtggattcaggtaatgtgtgcattatcttctgctgctaccaaacccaccagagtcgacggtccactaaattgagtggaagcgaggtagtggattctgcacgctgaaaccaatcactcgtacaggtcactaatctatggttccactatgaattatttattcaacctacgacacgtgcttaaatcattgttcgagaaagatcgaaactatacattcacattggttatgtttttattgctatgaataacccataatgttcaatcctcatatagaatacaaaagtcattaaagagaaaattcttctctgacagttatttttctattttgaatcagtgtttggtttatttttttaactaagaaaggtgtaaattaaaataaggttattttagtcactggattcgactaatagtaagttatagttctaattataat

SEQ ID NO: 28235 - DNA, 444 bp, Arabidopsis thaliana columbia
ttctctgcagagaaactttaaagtaatgattgagagactatgtgtatatgtgtgtgtttataattggatagaaactaaatcataataaattattattattattatatttaaagaaacttttgaagtatctcaccaatggagatggcctaatggtaccatgttcgtaattcgcctgctcagtcgggccattacagttattattttcggccttattttccaatattttaaacttcgattttacaaaattggaatacactgaatttggtgatatattacttttcaaaagtatttaggcatttagtatattaagcccagattctttccaactttaatatcacgtataaaataaactagacagatcgatatttctttatgataataatgtaatctccattaccaaacatgttatatcctttacgttggcacatgcgaacataatggtac

SEQ ID NO: 28236 - DNA, 435 bp, Arabidopsis thaliana columbia
tttatttaaagcaaaagaacaacttgtggctatatatagtagattaacaatctcagactcagagtgctgttatttcttatcatacaacatttatcttcccctatcaatacttccaaagcttatttagatagacatatatgtaattatggataacggattcccttaagttatatgaatcatacgggaatataattttagttgcttatcgggcttatgcaacgattgtgcatggtaccaagcgtccatgccaatacagttaaagtttacataatgcagattggtacgtatttctatatatcatatatgacttacagattatcatagcttaatatagccagtattgccaacttatcattcgtacctagaacttataagaagattgtgaaggatattcaaattgaaagagacgtaggttgtccatggatcttaagatag

SEQ ID NO: 28237 - DNA, 477 bp, Arabidopsis thaliana columbia
cccctgaacctcagcagcgatttcgccggaactctctccaggacacactctacgagatcgtggtggagcggttccacaactaaggagcaaatttttttgtttctcattgtctttcttttttttttggtgggagtttctcattctctttcagttgttcagataacaccactattgatgaagagtcttgcttcttatatagagttgtgctctgaatcgaaaaaagggaaaaaaaaacaaaacaaatggaaactttagaatcatataaagaaaatttcaaaacaaaaaaggaaacttcagaatcagaaaaggaaatttcaaaactttagatttttgtcttttgggctttattttttttgggccttaaaaatcgacttccatcacttccattaaggaataatatctttgcatcaaattactaatgtattttatggttttaatgtgaagaattactaatatatttcttcttttttttttttt

SEQ ID NO: 28238 - DNA, 474 bp, Arabidopsis thaliana columbia
ctaaattgtattcaactatacaatatattggtaatgatattgcaactttaagttgagagatcatactggaaaaagtacagtatctttttttttttttttttttttgaccgtatcatatcgtgtcggttggtcttcgcattaaaattaaaacttttcaaaattagtatgacgaatattcattataaatgaaactaaatacacattcctttcttgcgtatattaaatgactacgacagaaagataatcgtacgatagttttcagaaatatttgtgaggtgttgaaataatattagagtttcctaattgtatacttttcttcttctttttgcagccacttatttctatttatgtaaagaaaacagctgttaagaaaatattttacgtcgataagaaacaaaacaaaaacacttatttcaagtttaattataggaatatcagatccatcagaattctgaaaaatttgcacgttattag

SEQ ID NO: 28239 - DNA, 504 bp, Arabidopsis thaliana columbia
cctttaaaaaaattggggataataatccaaataaaaagatttggtcactgggacagattccgcactatatatatattcttgtctaaagaaaataaaaaaccctaaaaaaaagaggcagacagagagatctcctctttgtctttttactttatctcctgaagtttcgcctcagtcatctcgtaagttttctctctctttctcattcaattcaatttttaatgtaatttcttgtttgatttttctattttcttcgagaaaacaaaattctcctgtaaaatttaatattataaaagtggtttctttttcatttatgtttatataattttcatctttaatcttaaattctggtaaccttaatgcgcgatccgcttttctaaagttttgtgagagagaagagatctaaaaaaatccacaatgtttgttcaaatcttggagttaaatgctgaatgttaggccttgttgcttagatgtatggcttaaagtttcaaacttttcattggatat

SEQ ID NO: 28240 - DNA, 477 bp, Arabidopsis thaliana columbia
gccttatcgactccaaatttttaccgaaaaaattgaaaaattgttcaaaaacacagttttaggatctcattatacagatcaaatcacacgaattcatatcataataatttttttggaagtccggttattttactaatttgatccaacatatctatgatgaatcttagttaagatgtggtgatcactcaaacagtaaatttgtaaattttgttcattaaaatcagtttcttgtggacaaaaccatcctatttttggcaaatcaaagaaaatataattaatctcaaagaaaaaagctacaagaaaaaaaaaatggcctcaaaataaaaatagaaaatatctgacaagactgcccgaaatcacaagtaactgtaacaaaactgacaacgggcaaaaaaaaaaaaaaaaaaaaaaaaaactggccgtcgggaaatcctccaatagagagtcgccccctttactccgccccccctttttttt

SEQ ID NO: 28241 - DNA, 897 bp, Arabidopsis thaliana columbia
acaagtgttgaacaactttggtttaaacctttaagtaaatccgttggtatccgatgctggaattgcccgcttaatagtttcaatataagagtttatatacacacatcttcatacaaaaacaaaatataccatgaaaaattctatatattacaagtataaatacaaaacaaaacaaacaaaaaagtaaatataattaaaagaccatgcatttaaggatcactattaaaacaaagaaacaaaaattccaaatactaattataattttaagaaaaagtaagtcatttagtttggatcaacaacatcaacggtagcagcacaagataataaccttcgaaaaatccttaaaataacagaacaagcttgttcttgtttgttcttcctactaactctcctcttctcaccacgacgacgcggctttgtactctcaacgatgatgatgccattttcctccttactcttacgtcgagacgacgctgttcccttaactctccctagacacgacgtctgcgtcccagacgacaccttctccgatttgctctcgtcgtcttcccgagagaaagtgtagctacggagatacatctgtcgacaagatatgctatcaactacacgggccgccggtaggccgcctccacgacgtacggacctgacgaactcggcgtcggactccggccacttatagagattcacgtaggaggcacgtacaggacgaaccggcacgcgagggtcgtgtgcatcgttgatgcagctggagatacacactgagttcattctcaatgtttagtttttgatttgtgatattactttttctccttcggtgattctctatcgtatatgtctaatatatatggattttttattttaaggtttaataacgtggggacactggcggccgttact

SEQ ID NO: 28242 - DNA, 663 bp, Arabidopsis thaliana columbia
gataggctaggataccactatactcgattaccccatccttaggaatttctcgtctatattatttctctgttttatcgttatcgcttaatcattctcattgcttgtttcttagtttttgcaattactcaaccaacttactcgaccacacccagtgtctggcaacagactgtgcagtcgagtacagttatcttgtttcctgtctgttactcgaccagtatactcgaccacacccagtgtctggcaacagactgtgcagtcgagtatatctgtttcatatcatgtctgttactcgaccagttactcgaccacatcctacttctggcatcagcctgttgtagtcgagtgattttagtaattctgttattgtttctgttttctgcatgttcgcttaggactgttagaaaccccaaaactgttattgcttggcttgacttagtgacttctgatcacatctcatttgtttgtatcacactcatttggattgacacctaaaatactacaacgacaggatagtgttttagaattaattgactaaaaacctattatcaatattcttccctaacataatcattatcagaatcttcattaaccccacactctatcatcagcggttcaataacagtttcagaaactccaatctctagcatcataggttcactaact

SEQ ID NO: 28243 - DNA, 560 bp, Arabidopsis thaliana columbia
tccaacgtttctcattcttctcttagtaaaattgatattttgtcgaactaacatctgcaacttgttgattaataagaaacttctctattctatatagatgatcgaaatgcgtttactgaagaagaacaacttaaacactcaccaccacaatgttcaacatcactaaacctgattttccacaatatgagcccgagtctcactctaccattcatattttcatgtgtgtgatcgcctcattcttgtttctcgttttggttggagctgcgtctgcttttgtcttgagcgccgcaaggaaaaacgtccctgagttgagccagtctccgcttccatcttccaactcgtcccaagcaaataataagcaaaaaccaagcaaaacataagaatgaaaaatatttttttcaagactcataccttagccctgtcatctcggtcgatctttggttctccataccatttcttcatatctcaatacaaagctaaacaataaaggaaattctataatagttaaatactcatatgtttctaatagattattattttggaaaaagttgatattttac

SEQ ID NO: 28244 - DNA, 237 bp, Arabidopsis thaliana columbia
gattattatttatgcatacaacctaaactccgcatacatttttcatgttacatatgagctaccaagtccattaaacgttttttgccaaaaactatgatgattaatttagtttattcgacatgcttttgaggccaatctttgtgtttatatttgtacattaacacatgataaaaacttataagattactaataataattcatcttatatctatctatatatatatatatatatatata

SEQ ID NO: 28245 - DNA, 521 bp, Arabidopsis thaliana columbia
taacggccgccagtggccgccagtgtgctctaaagctcatgaaacaagtcccgttgcatattaattcataatcattaaaaatatttgatatgtaaattatatcaaaaaatttgttttgttgataaaatgtgaaaaacgtaaatatatcaacttttattccaaaataataatctattagaaacatatgagtatttaactatttataaattttttttactgtttagctttgtattgagatatggaaaaatggtatggagaaccaaagatcgaccgagacgacaaggctaaaatataagtcttgaaaacattttttttcattcttatgttttgcttggtttttgcttattatttgcttgggacgaattagaagatggaaggtgagactggcttaactcatggatgtttcttaacattttgaaggtttgagtggttttctagacacatccacttatgtattgattgaacattgtaaatcaattataacttgtaattttatttaaatggatgcttaagtagacgat

SEQ ID NO: 28246 - DNA, 664 bp, Arabidopsis thaliana columbia
ttcaggaggatatcatctggaagtccatcctttgtgggtaataatttgggaggcaaaattcacccggtttttggatttcatttatccacagtggggacaccacccaatgctccacactggggaacaccactaattgctccacaatggcggcaaatatttggaaaatttcagcaaggtggttcaagtggaacgtctctgacaaatgttcaatatagattttaagttggaagtcaaggagatggtgcaacaatggaaactccaccgatcatacaacaaacatcatcatccggtgtcggtttcacaaattattttgaaactggacaaataccacaaacacctagaccaggaggtctctttaatatttatggaactccgcaaggatccaatgcaaatcatcacagtaatgtaggagatgaagaatagtttatatttattgtggtgtatcaatctcacttatattttgaaatgatttatgtttttattaagtttaatgttgaattttatttaatttatgtttgcaaaataatttatgtctaatgacatatatcgtttgtattgaatttcaggcatttagtatatgtcagttgcgatcacaagaccttaataatctagtttacgaagaaagaattgagttgtggaatttggaaaacgacaatttgaaaag

SEQ ID NO: 28247 - DNA, 725 bp, Arabidopsis thaliana columbia
tcccaataaaagatcaacaattcaaaacctataaagatcaacaattcggaattttttgaacggccctatcacttttgaattctaggtaataggtttatctcaaacttactagaaaaaccaaaaaaaaattttcaacctacaattgacactcttgacaattcaacagtttgtaattgcaggttttgattaaccaaaaccttctctattctatataaacaatgatcgaacaagaagagcgaagaagaacgaaaaccaactcaccaacaaaatgtttaacttaacgacgccaaattttccacttccaccaaatcactctcacactcccgccttagtggttctcttcggtgtgatggcaacttgttcatttctcatcgtggtggtagcggcagtgtgctactgtctggaccaccgcgagcaaactcgtccatgcgtcgagcaataatctggaaaaaaaaagccaaacataaggaaaaaaaaaaagcaaaacataagaatgaacaaatgtatgccttatgttaagtagtaaacaagttgctccatgttcatcattaaccaaaaaaagctatagctctaagcaatgaaaacactttcagttaacctaattttaaagcttccatttttctcagccatcaaacgataatctcaatcccaaaaaaatacaagtatttatttagtaaaaaaattgtaaatccgccaccattcttgtactaactcaagacaacaaa

SEQ ID NO: 28248 - DNA, 584 bp, Arabidopsis thaliana columbia
cccttatgtagttaatttaggattcgtctatgaattcgtagatttcttttctggggtcacaattaatcttctaaaacataaatgaagaggaaagtctgattttaatcacatttttaccttatcaaaatacaggagtcccgacggatattcacttttcgcatgttccttggacggaacggtggcgatgattcactttgacccaaaagaactaggcgtcaggctaaccgatactgaactcgacgaattgaagaaatctcgatatggagatgtcagaggccggcaagcaaacttagttgagagcccagcccagttattacttgaaacagcctcgacaaagcaagccggtagtaagagggcggcatcggatgttcaacaaaatcaggtgactacaaaaccatctgttagtgtggagagtactgcaaagaggcgtaaatcgcaagtcgatgatcggaataaggcagcagagtctactggtcaaacattaaataaagcatcaaccttaaatcgagtatctagtcctgtgaatcaaaaagtgtatagaaggcctgacggaagaaagaggaccattcctgaagctgttggag

SEQ ID NO: 28249 - DNA, 520 bp, Arabidopsis thaliana columbia
tgctcctcatgttcttctcatatactttacaaatagtttttctcttttatgcaaaatatcattctcaataatacaaataagacaagtacaaagttcatatccattggtgttttagtcaaaatgccaatgatgatttctcacacaaatacaaataattaattatagcaattttaaccaaaaacttgcaattacatagtatataatattaacttcaagaagaaaaaaaatatatatctactttgaggaataaacaaatcacaataaaattccgagaaacaaaatcagaattggattaaaatcctaagaaaaaacaattatcctaaaaatcaaaatttcaacatagaaaaatgttaatataatttatttgtttcagagtttattgttcaggaatagttacaagtacaggacgccaagatcgtctaagtaatctacatcgaagtgtaacagatgacatgggcctaacagacccgttaaagccccacgccgagccgttatctcttctccaaaacctgcgttatta

SEQ ID NO: 28250 - DNA, 616 bp, Arabidopsis thaliana columbia
cccactcccaaaaacaaaaacaaattccccaattcataaaacacgagaggaaggaagacttgtgtgtatctctaacaaaaactgactggaaggcaaactaacttccactgcctttcctagcgcggaactctcttccggctaagtatctcctgttctttcagacggtgttggaaccgagcaagacgggcttgaagacttacaagaccagctgctttacgggacaacacaaagctcagctgtgtaacatagttgtcaatcatgctccctggccgatccaccttcgctagtaatttcatttcctacaaaaaaaaacatgaaataatgttaaaacaatcacaagacatatgagccataacctcgtgaactatttccattgtatcctcgatctcttttctgtgtgctgtaattaaggtctcttcttcctgccagagtttaaacaaaataattaccatattacaggttttctaaggttattcgtgagcgatattcataaaattccctcacgctcatagcataatttagaagtatagaagggtcaaatggctctttacctcaagcaatgcatcaatgttttcacaagagaaggctccgttgtttcatactgccttgaagatgt

SEQ ID NO: 28251 - DNA, 753 bp, Arabidopsis thaliana columbia
gttaatggtatggatagtacttatgctggacttcttgatagaagacatgttgtacgagaaccttctattgagcgcaatgttagatttagtagaactctgagtgttggaagactccgtgatagagttcttcgccgatcttcactctctgatttcgcattccgtccctcgccacatcagggagaagaagatactgatctcttctctgctgaaaccgcagcagcagaggatgctcctgtgacttcaacgtctatactaaatcgttccgcttctagcattcgaaggaccttattcggcattcaggatcatgagacaccagctgctcttgtgagagaagggaggtatcaaggtttattagaacacagatcagatttccttgaaagaaggaggagaataagatctcaggtttgaaactcattgattctctcttccttgatgtgtctgatcaactcaagatctaactaactgatataactaattccacaggttcgcgctcttcaaagattaggaagccggtttgagaatgtcgcagtccatcatgatagatcttgtgtcttatcaggtcaagatcaagcaggtcgctgcacatgccgtgcagttactaaccgtggttcgacaacagcaacaaccgatgaaacaaatgcaagagctagcatctcaaggatagtattgctagctgaagctctcttcgaggtaaatacatgttttcggtctccctactaacagctttttgccactatctttctttctcatgta

SEQ ID NO: 28252 - DNA, 615 bp, Arabidopsis thaliana columbia
atccccgccacgtgacacattaaatcagaataaagacgagtacacaaaaagattgcgtggttgtggctgttaatggctttttaaacccaatgggcttttaacctaaactaaatgggtcgaaaataaagcccagttctaaaacctcacactttattgctctcttcccgtcttcttccccatttctctccatctctcacagttcatagtttcgcgtaaacactacgcgccgccgtaagcttgactatctagttcaagtcttccgtcatgtctacgacttcctccgtgcgtgttcgactagctttcgttgcgttactctcagcgacgactttttactgtatccataaatatcgtcgcttgaaacatctgaaaaacctctcgttaaaccctagctctacattgaaagccagcagaggaaagatcttcttcatctcccaaactggtacagctaaagccttagctcaacggcttcacgagctatgcgcatctaacgacatagcatttgatatcgtcgatccacatagctacgaacctgaagatctacctaaagaaacctagttttattcatcgcgtcgacttgggatggcgggaagcgccctaagacggagagttcttgtg

SEQ ID NO: 28253 - DNA, 513 bp, Arabidopsis thaliana columbia
taaacatgtctggaaggtgaaccagactactttagatcatcgggttatggatcatgaactaggttccaacacggtttaattaaataaaaatttattaaggtatttttcatttataaaaattaatatagttttttatcgaatgtccccaaaagaacaaagattaatataggtttataaatgtaaatataaaaataatcatacattaacaaaatatgaagcctaacgattataataaagtgactaaattttttaaatctaactaaaaccgaaaaaatactagaaaatcattagtaactaaactaaactagtaaaacattaattgcacgttccaaactaccagtattaagtttctaccaaaaaaaaaaaaaaaaaaccaagattggttgtttctcaccattttatcactgatagaagttcttaaactaattaaatacactagaaccctatattttacccaaccggtccatcggatcacgtgggggttaatggcaagttataatgggttgtccggtt

SEQ ID NO: 28254 - DNA, 469 bp, Arabidopsis thaliana columbia
cttcgatctactactccatgttaggtccttagtcaccaccaagtcttctttctcgtatcttcaacttgatactactgaaaacgcagcgtccaatatttgctagaaattctttgatgctataccaaaatgccaaaaaaacaacaattatcataaaatgataaaatcctaagttaaaactcgataaaataatcaatcaccattcctaattaaacactacaaatgataataagaaaatacataagagactgagaaagtcataaatttcataaaattttttaaacatttggtggatttggctcacctcgatgatctgcttctcttacgggtttttttcttgctctgattctctgtgttagcattgttcacaggcggttttggtttttctgcaagctccttgactcctagtttaacgaattcatcaaccactgtctgcataaagctagctacatcggtcttaaacttcttggag

SEQ ID NO: 28255 - DNA, 764 bp, Arabidopsis thaliana columbia
tccctagtcaccaccaagtcttctttctcgtatcttcaacttgatactactgaaaaacgcagcgtccaatatttgctagaaattctttgatgctataccaaaatgccaaaaaacaacaattgtcacaaaatgataaaatcctaagttaaaactcgaaaaaacaatcaatcaccattcctaatcaaacactacaaatgataataagaaaaatacatgagagacagagaaagtcataaaatttttatcaagtaaaactgtacatacgagaattacttgtctttcctctctaattcaagatatgaaaagcatgaaacatttggtggatttggctcacctcgatgatctgcttctcttacgggtttttttcttgctctgattctctgtgttagcattgctcataggcggttctggtttttctgcaagctccttgactcctagtttgacgaattcatcaaccactgtctgcataaagctagctacatcggtcttaaacttcttggagccgctctgtctagcttcttcaaggtcttggacctccgcctttaaccatcgatccaagcggacgtccagctttataagcattgcatgctttcacaatgtcgtgagacggacaaagtaatggttttgaacatactcttcaaaatgctgcacatttcatcacaacaagtttcaggaaagaacaacccaattcagcttggaaaacaagaagatttcagcctattcaggaaacgtatgaggatttgacaaattatttacctggggtg

SEQ ID NO: 28256 - DNA, 463 bp, Arabidopsis thaliana columbia
ctaaagtgtgagtcgccaatagtgttagtaaccgtctagagtcatacgacctcaccacactgcagttcattttagaagaacaaccaccacccaactgtgaatccgaagaatgagatccacgtaggattcagagagggctaggacaaccgccctcaagtagtgtaccgcctcaaagaggatgaagcttagagcgtcgggaaaggaacctcttcgaagagaattctcgccaccaccagcagcgcggaatgcttaagcataggatttgtgattgatgaagttttttttcttcgaaatcttgcacagaggtcctgactagaaagtagatcggcgagagaaaaatagaggggagtcctctccagtcacggcaaggagggtcgtgaactggagaggcagatcttagtatgttagggttgtctcttttgttttcgagagagataacataaaggagcatgtttaggactta

SEQ ID NO: 28257 - DNA, 563 bp, Arabidopsis thaliana columbia
ggcctatttactaaggtgaacaattgaactcgtttagaatgcatgtttaagttatagatctctcgtcttctccggttattcttagctataggcatagggagtttcgcgaaacgccactggttattccataataagattttgagtttaagaatggttcgataacaacctaactatcattagtttcatgcattttagtatagtttgcgtatgtgatgctttcccaaggttgtatcctagtagtgtgtgcgtagtggctagtttcctacacatgaatggtacgaagactcggagatgacaagctcgcaacctatggtcgagtgctgcatgacgatgtagcctgagtttcactagaatatgggactctgaacttagtgatgttctatactagtttagcctttttggctacttgtataggtgttccgactaagggaagggaatatcaatacgtgatgcgtgtttgatttcgcttcagacttttacctgaaagaccacacgactattgcaagtgcacagtatatcagagtagtatttaggactaatcacaaggagagaagtagtcagag

SEQ ID NO: 28258 - DNA, 504 bp, Arabidopsis thaliana columbia
aataatatagaaacgactgaagattgcatacctaaaagattaaagggaatgaaacaaagatgaacaagcaaatgaaagcaaaatctgaataacttagaagaaaaatcaaaatacaaagttgaaggaatcaaaagcgactctgaataagttgcagaaaatctctgtaaaagggtttgtaagtctccgggtgtctagggcaaaacccttagaggcttatttatactaaaaaacgataaggataagaaagcgggcttcgagcccactaaacggcccatggacgatatgatcaagagtgtcggctcaaagcaggcttcctaatgggcttcaaagtgggcttcgattgggccttctcttctcttcttttttcttcctcaggttgtctggttgaatgcggattgatcaaagggtcgaggtggtggtcgagtaggttggtagacagaatggtctgggctgcttcttggcctttgtgatcgaggatgtgtgtgagctatcaggatggactgg

SEQ ID NO: 28259 - DNA, 392 bp, Arabidopsis thaliana columbia
taaataattaaaaattattaactaaagtaatgaatctattaattaattgaaaataaatatatgtgaaagaatatttgtacaaaaaagcaaataaaatatctagtagatatatttctgaaataagtatttagaaatttaattttttgttttacttgatttttcaaaattttataccaaaatacaatttattttaatcttataattgtatttctaatcaaggtgttccaatttcatttcgctaaatgttatagaaccgatcccaatacgaacgcgaacctcacttatcagctctcaatctctcaactcgaagtttgtttgtgtgaatcatagaagaaacagagcacaacactcaagaatttgttacccagttcaatctaatctgtgtgattaga

SEQ ID NO: 28260 - DNA, 748 bp, Arabidopsis thaliana columbia
gcacgattatggattaatcatcactcatcaccatcgagaaatctctagtttcaacaggtctccagatttcgaagcggcgtatgagtttttttttgccagtgactgtttctgcgccgattgaagcggtgccgctttgaatattgctacttttgctcgctatgtcaattcaaagtctaacagcccaacccaataatcgttgagtttgggaagacgaaagaaagcccacgagaatcacatgagaatgtgattgcttggcaggtctaaaaccctaaataaaaaattttcaatgtttggatttgtggatgacacaggattggttaatactcgttcttggcccgactctcctttccttcggtaatcgaatagtaatatttatttagttaatatctttagctaatagccaacaattttatttcgataaaaagaagtatctgaaaaacactttgataacaattagatagtaattgcatgtattttatcaaactacctatggtccacgtcatcgagaattacatgccaagttgctagaacatgcccacgaaagctttatatatttctatagttaatttcaaactaaactttcaacttatgaaaataccttgttttaagataccaaatagaggtatatgacaacaaggtttactgggcaaatgtgtttgttggggaaataactttcatcatattttcatatcttcagcaaattcgaagatcgtgtgcttcacagtgagttgtattatgctgcataatt

SEQ ID NO: 28261 - DNA, 588 bp, Arabidopsis thaliana columbia
gggttcaaacaagagatctgtttttaggtcacctttcatcatccagttccagtttgatgtcgtctgtcctcctactgatctgttcatattccttttcggatgaagacacggccgacttgagccatctgaattccttgtcagcatcagctacttcccatttggtggtttcgaggctgataacgaggtgacgatcttcttgaatcaatttataagcctcagaaaaacagcctttcatctgcgaacataagaacattagtaaaagacactgatgagagaagttttagagagttacaaaaattacacaagaactctcctctaacctgttcctcattatgtgcaatccttgctttaaaattctctacggatgcattaacctgatggagctgcttttccattacttgcttctcagataagtgagtgttgtaagcatgctttgtcttgacactttcggaaacaagctgaaatcatagatcaaatcagaaatctacaaaagatgtgttcaaaggctagatatagttaaagtcaaagattggaattgagaaaagatgaaaaaaaaaacaaaaaacaaatctcagtatcaaagtgtcc

SEQ ID NO: 28262 - DNA, 497 bp, Arabidopsis thaliana columbia
tacaatcttatttaactacaatagctaactaaactacataaacattcattatctatataattatatctcattttcttaaaagtatcattatgtactttggcattgtccttacggttttaatcttttaagtttctaaattgaaatcacatcctctgtctttttaaaacacgacaaaatatattgcattgccttaatttttaaatacgtccaaccatcgcgttaccaaaataaaaacatattttcaaatacacatcacataaacaccaaaaaataatcttttctttgcattgtagcgtgggtcgatcatagtttattaacataaaatcatactcggttcggtataataatgtatatatcactcgtaacaaaaaaatttggtttcgcgttgatgaatttttatgcaagacaaacgaatgacttcattaactaactttcttacatcatgatttcaaattgcaatttaggaaatgattgtaactagaattttagaagaaaaa

SEQ ID NO: 28263 - DNA, 519 bp, Arabidopsis thaliana columbia
aattacagttttttttagtgctttgagattcttttccctgacatattgttttatgtaaaatagcaaactcgaaaagatagtaatagtatccaaattattattattacagtattatttttgataaaaggttgttattctttttttatttttttatttattgtatctattatataattcgaaactgctatattgtttgtctttagtttgcatctctagctttatatatgcttatgaagtttcaaatgttgctattatatgctgctgattctttttttcttatgtaggagtataggtttgaccgtttgacaatacgagaggaagaggaagttgggaaaaaacgacgccgcatggatagtctcgctcgttgcacgaatagttcaaaaggtgacgttaggcgcgtgcgggtcagcgaaacttgtgcctagtcagacctttgtggtatagtcttacgtggtctacgtctgccaaattttagaaaaccaaaaaaacaattatatgtttggtcgtagaaataaatat

SEQ ID NO: 28264 - DNA, 813 bp, Arabidopsis thaliana columbia
ctgcaggtcacgtcgactctatgacgtttctcctgttttccaaggtctctttactagccaccatctcatacaagatagaatcatatggttcaagctccttctgaagagttgtgaagtacctacacacccaaacccaatccacatatatcaccacacaagaaactaattaaaacttaatcaaactcactagtgatataaacaaattacgagcaatagaagaaagactcactctttatctgcaatatgaatagttgagaccaaatccacctgcaatatagagatgatgaaatcgataaaaatgttacctttatcgatttaaatggaaacccagcaagtaacagagatggtgatgtaacctgaagaaaagggttgagaagaatccaagggaaacgtttcttgtaactcacgattgcagtctgcaactcgctggtaccatttccggggtcgggacggcgtttgaaccgcatgtaatcagcaattgaattggattcgagaaaaagggcggcgtcggaagcatcatcagaaggctgattcagtgagcacgagacgaacacatttggacaacgggaatttgactggaaccggtattgagatatgcggagaagtttcgaagatgagtaaaacgaagaagaagaagatctatcggttgtggagctgtatgaggaaccaaatggaggaaggacggcgaatgagctcaccagcatggttcctccctcgtttttgttttacgggatagttgagattgagcagaagaagaactagtgtgtgatgtggagaagatatttcgccatttttcgaccagaggaagtttac

SEQ ID NO: 28265 - DNA, 476 bp, Arabidopsis thaliana columbia
tgtagcaaatacaagtaaacaagcttcttcacttccgatgactgtgacgccacattcttcaccacctgccattaaaattcgtccaaaaattgtttcaaaatcggagcaacaattctaggatcaaagggatcaaacaaaataaggcaaacacctgaggaaagaaattggagacatcaaagccttgagcgataagagcaaggagacgcttaagagcttcacatttctcagattcgaacttgctatcgagaagtggagcaatgttgacgtcttccggatcatcataaagatgagcgtcagtgccgatccgaagcaacccagctgaagctttgctaagagtctccgacgtcgaaccaaacttattgaacattccaactttccgatcaaatccgattccgaaattcagagagctgtgtaagagagacagagacgatgagacgaacttttcagaagagaagcctgtgttaggatgatggaat

SEQ ID NO: 28266 - DNA, 276 bp, Arabidopsis thaliana columbia
ctggttaatttggtaaactatccaaagagtaattaaatgattcctcgtcataaatactaattttctacgttttaagcaaaaaagacaataattatttggtctgaaaactaaaaaaagacacgagattaagggaagaagataacgatctagaggaataggcaagtggaagaaccagaacaacagctgttcttttcttctaaacttcagaagtcagccgacagttaatttctcctttttttgaggttttgtcgaatcctataaatttcaactaaactc

SEQ ID NO: 28267 - DNA, 583 bp, Arabidopsis thaliana columbia
tgggctttggccgaattcggtttacctggtagtcagaaatgcaggtggcctgactaccctctgacattagtcggaaggcattccaaactcggaccaggcagtgtggtggtccaattctacctggatcgggagaagtccactctgtatcacttcggtgcgttcctaccaaagctaaccggatcagccgatagggtatatcaaaaaaaaaaaaaaaatggctaatgctgatataagtgaaaacattgttttatatcttgaaaaaacatcttgtaatagaatcaacttgttggaccataatgttctcgaatgtaatgttcatgattctcacacgaacaaattcgacaaataaaaaatgtgtttcgatgatctaaaactctattgttcgtgcatatactgacactcattaaaagaaggagctctctctgtgataatttcctaatcgaaagtggcaaaaagttacgtatatatatatttgtctgtccataagctttgaactttgttagtaaggtttatagaatagttgttaggctaatagcttcaaacccaacaatggatggtgggtagattagtcatgttatttata

SEQ ID NO: 28268 - DNA, 480 bp, Arabidopsis thaliana columbia
ctgatgtcagcattaatcctgatccaaaatatgttgaggtactttgttcttctacttttttgtttccaccgccattctatctatctgtaatgtgttagttatgtgaactaaaacaacaggaatgattttctatgcctcccgtaatttcaaagttttgactgcaacttccatatcaatctagaattcccatggggagaaataaatcttatggactttgatgtctcatatatagcagtgtcctttagaaagtttggagcttgatcttgcacattatgaagttcctgctcctacgccttctgcaaactcgtaccttgtttatgcggcggacaatgcagagaatccacgatctctttcagcttctggttcgtttaatgacagtactccaaaagcagcacagagaaatactgaagattccagtgtaacggttgatggatcacatctgcaaaggtagtactttgtttagttgcgtggtagatgcat

SEQ ID NO: 28269 - DNA, 963 bp, Arabidopsis thaliana columbia
gaggctagaggatccccctggtgggacccatggcaaatagatcataaagtcttcaaaaaagaatagatacgattgcattgtatgtactaacggatgcgatcataccagcactaatgcaccagatcccataaaactccgttgttaagcgtgcttgggcgagagtagtgttaggatgggtgacctcccggaaagtcctcgtgttgcatccctctttttttcggtttttctctattttgttttgttaaaaatgtatgactctataacttttagaccatgaggccaaacttggcatgtgataccttttcggaaagcccaaagagagctctctgatgaatgaggaaggaaaatggaattcttctattgttttttttctactccaaattttgacctaaatgtactttttcgggccttttcgtgatctttgctatattacgggggaaaattatacgttcggacattgtttttgaatattttgcatgtatcaaagctccaataaataagatagggtatcctacatagctggtgggaccatggcaaatcgatcataaagtcgtcaaaaaagaatatatacgattgcattgcatgtagtaactgatgcgatcatactagcactaatgcaccagatcccatcaaaactctgcagttaagcgtgcttggacgagagtagtactaggatgggtgacctccaagaaagtcctcgtgttgcatccctctttttttttgttttttctcttttttttttgttaaaaatgtatgactctagaacttttagaccgtgaggccaaacttggtatgtgataccttttcggaaagcccaaagagaggtctccgatgaatgaggaaggaaaatggagttcttctattgtttttttttctactccaaattctgatcttaatgtacattttcgtgcatttcgtgatctttgctatattacggggcgaaaattatatgttcggacattg

SEQ ID NO: 28270 - DNA, 545 bp, Arabidopsis thaliana columbia
tctgtgacggttcctcctcagagaatatttagaaaccctaaatcaaacaatttattagtggtctatatttataaggaaaatattattactaattacacttaaatttaattcccgctgggttaaaatttagcgggatctgaaaattttagtgatttattattttaaccaaatgcatatgtataaattaactttttaataagtttgtttagtctatgcggtaatctatactaaaaaaaattaagcccaccttttttggaacctccatcaaaaattcaaggaaatgttacacgtgcaataacttagataaaaatgtcaaggctcacaactctaaaacttagcaaaattaaaagaggaagttaactatttgactaagaaatttaaacaccaagaaagttctcataccaccgtatctatttcatccagcaaggatattaatcatgcagatgattaaacaagaaagccgaaagttaattaatggaggacatgcatctaccacgcaactagacaaagtactacctttgcagatggtgatccacaaccgtaca

SEQ ID NO: 28271 - DNA, 321 bp, Arabidopsis thaliana columbia
attcactaaagttcgacttaatattcgtggggtagaaagtaaaaaccaactgcacattcacaagggggaatctgtagatcagtctcgtgttcagggggaacgattgcatgaaatggacgaaccaagtgaggtggattctgaagatacctgcacggaacttcaatgcatagaaacagagagtcctggtatcatcatgtatccagagccaaatatacttccagaccggtgtaaggctgtgagtgcactaccattatgtgaaccagagtcaaagaactcaagaccaccaacagaaactgcagaagaaaaagaagaaaaagaaga

SEQ ID NO: 28272 - DNA, 660 bp, Arabidopsis thaliana columbia
ttttgtgtttggtttatactggtttagagaggaaaagaaaaaaatattcacgcgatggtgattttagagacaagtgcgttgataaaaaaaggcacaatttcagaaggtaaacccctacagaattgctctcacgctctctacgcgcactttgtgagagtggatctgaaatagaactttctgattggctaaaaaactctaaaaaaatagcaatagtagacatgttgctagctcttgttattatttagcttttctacaaaacgcagtcgtttctatttcgatcgtttcagcttttgacattgatccgaaccaatcggttcaactggcttagtctatccacaggttcgtataaaaaaatctcattttgtcatcaaattaagcagtaaatttatattaattaatcataagttaatgtttaaagacaaattctatttcaaatttctaacgaatcagacctaattgtccggaataaatgattggttctgaaaatatcagttggaaattaaaacccggttcaatttgaaaccggaaacaagactagtacgcctggaaactcacacagagtcacaggagaagtcccgcgtctgcaaggaacggataaagtctctctctttctcacacacactctctctctctctctctctctcaaagaagaagaagatg

SEQ ID NO: 28273 - DNA, 1089 bp, Arabidopsis thaliana columbia
taacccttttgagtgttatatcggttctctacctttaaacttgataataagggcgagttgctgagctcttcttggaatctaaactagcatgatgatcggggaagcttatcaaagccgatggaatgtcgaatccttgattagcatcaggaggatattcatctatatgcagaaaaccctgttgagaaaatttcagacacagaattagtaccacaaacagtattcatatactcatgacaatcagattatgctaggtgaattggaaactatggagaacgaaagatcaccttatcatattcaattgatatggctacagatttcacttcacatggtagttccaacatcatctccatcatgccagatgacaccttatccgtagatggtgagacattgatcttctttaagacctcactgtctgtcttctgttgttgatccacaaagatttgtagagtatgataataaaccttaatataccatgggaaaatctggaagatatttgcttttattgtacattggccattagtgagatctctgcctgataacttctcctgagattctgtcgcttttaacaagatggctattgcacctctttcgttcccgcttcccatcaaaaaccgactcgagtgtaatggagcttgttgacatgaccactttgagggacgcttccaagtaaggccaagatcaaatggctcgctgtcacttgatttgtcaatatcaaaaataaaaagaaagctgcagctttctcgaataaccctctctggcttaagagacaattcaaactctgcattcttccatagttggtgtgcttctatttctgtatccacgttttttgattcgtaaccaagaagaccttccaattgaagatacacattacttgactttgcaagaacacatctcccaacaacttgtctcccaaagagggagctgagggaccaacttggctgcatatttgattcaacagaagtagtctcaggctgaagaacaacagtaagcgtctgctccagcactataccagaacccaatccatcttgaccagattcaaccgtggataaatgcaatctctgagaatgataaaaccctctgtaaacagat

SEQ ID NO: 28274 - DNA, 461 bp, Arabidopsis thaliana columbia
gaggttacagaacaaaataagtggacttgctcttttgagttcgattgaagaaagaaaaagacggaccttttcgtcggatttagtcatcttggttttgagagatttgagagtgggttcgctagtttctggctgatcttgagcttgtttcttcgatgacgagctgttcgtcattcttctttctgggaattttaagatttcattcagaaaaaattaaggtcatcttcttcttcttcgtacgatgttttttgcttatcaagagagacaaataacacgaattgatgaatctcggcttaacttcaacagatctgcttctagtttttttttccaatggagccagatccaaacggcgaattcaacaagacgatttcttttaggtttattagttttatctactcatgtgaaaggcccaatttatttagctacacaggcccaaatgtatcagaatttgtctacgtagctaa

SEQ ID NO: 28275 - DNA, 482 bp, Arabidopsis thaliana columbia
attatacaaagaagaaggaaaaaaacaagatattgagagttcaaaacaagaaagaaagagactcaaacaccaaattgcacaatacaaccctaaatgagcaacaacagatgatgaaccaaagataaaagagagtcttgtaacaaaatagaccagaaacaaagattgcactaattaactctaaatatgtcaaaaccaagactttaaccctaaatcaaatcaaaaccaaaagattaactctaaataacaacaacaatggctaaccaaagaatcaaaagaacacaaacctgatacttagccactgtaatttcgcaaatcttcttcctgaacccgatattgtcccaagagaagttttcaaattctctccggaatctctccgctgcgagagagctcgtgaagttaacgaaggcgtaacccaaattggctcgtttcctgttacacattaaatgtccatcatcaccgctattgcaagaagcatttaattt

SEQ ID NO: 28276 - DNA, 530 bp, Arabidopsis thaliana columbia
ttctagaggatcacattgatttgttggcaaaatcataaaagttcaaaataaaataatttttgttacaaaagtacctaaaaaccttaaaattcttaagaaaaaaagagagttattttcacaataactttgggggagaaaatgcacttatgagaaaatgatgggacccaatggttaggtctttcacagacttgttatttactgaaacagtgacccttacgtaccaaaacaaagtgacactattttgttcgatttatagattggttttcaaagatattcgagtggctgacgataatataatctataagactttaaacaatctttgtaagacttacaacattattagcatggagagtacaataataaatataaaagatcaaaatcaattttatattgtttcatctctggctgccaacaatattttgcagtttacaatttcatattcctaaaactatttttcatacaacaatacaataaataaacacaattttgtataaactatatccaatagaccataccaagagccgttgaat

SEQ ID NO: 28277 - DNA, 525 bp, Arabidopsis thaliana columbia
taatttttgaccttttattttctacttattctccttgtctacatatcatatgcatcaggtcaagttgaccaattatttatatatgagtgtcatatcattacattaacatgtatcgttttatataattaaaaaataaagaataacaaaactaatcgaggagaaatcaaaagtaatttgttctgttaaatccttcattaatcttactgtttactaattttttttaaatattcaataaaattaaaagtcatactaatgtatcaagtattactttcattctactttacatatattttttatttttttattaatagtcattgttggatcggattcccacaagcaatatcgaatttaacagtaaggaccgcgatcgccatgggaataaaacaggttaacgccccaagccaaacaaattacctcgggaacttattcaatgatccaccttgggctggaacacaacggttgccccgaagtcacctgtcaaacgttcaccgagtcctaaagaaaatcggaagcaaagacttgtag

SEQ ID NO: 28278 - DNA, 602 bp, Arabidopsis thaliana columbia
ttgttctgtaatttgtgtgggacaatgctggtcttgaaatcaaccaagtatgcagaatgtccactatgcgaaacaacgcgaaatggcaaaggtatccatgaaattctgttggattttttgaatcgaatcgaacagtttttggttcttgatttggttaatcttattgttgttttaaacttcattgttttcagaaatcattgacaagaatttagcttacacagttactactgaggtatgtgttttcctttactcagcattgtggattcttatctttcgctgcatccatatgtgtgtaaatcaatcaaatttggtttctgtttcacggagttgcaaagatctcagctcttgatttattttggtccattattatcacttaataggcagtgaacacacacagagacccgtgcatgctatgtaatcagtttcaaaacttaaaatggagactgcttttgtaatgttctttggtgtttgtggaaggtaccacaatgcagagttagtatcaactcatgatctttggcgttttgcaggatatcagaagagaactaggaatatcagagtgaaaaaacacaggaagacgctgagctaccaaaggtttttaagaa

SEQ ID NO: 28279 - DNA, 454 bp, Arabidopsis thaliana columbia
tagaaacagtacaagacatttacttcctcaggaaacaaaacagcctcatatttctctgtctctctacctgtgatgttagattgatacactgcttgcttgtggcggcctttcaaagaacccattgttcatccaagaacatgctgatatagtcggtatattaccaaccacactcgctttcctcttctatattcgaaccaatcactaaaatgatccaggagtaatcttactaaacctatctattcataggttgtccgattattcttcctcgagaaagcgagtctgttctcttaggagcagcaattcttggagcagttgctggcaagaactaccctagtctccatgatgccatgaaagctcttaacgcagctggacaagtatactctgatctaactactttgtttgagtaccccaattcatacattaatcatgttatttatgctatttcttttgatga

SEQ ID NO: 28280 - DNA, 808 bp, Arabidopsis thaliana columbia
taaaaataaatatatatgcaaaggagttgtgattattaaaaaaataaattaagtgtcgttagctcaattggtaaagattttaggcgaaccttagaggtcgccagttcgagtgacgcttgagacgaaactaatattacattatgtggtttcgggtctagagggattacggacttcggtccagaacctcctgttattcaaaaataaaattaaaaaaataaaaaagagaaatatattatatttaataaacattaaataaataacattttaagaggagtttttaaaaagatgatataaagatcaacttttttggacttgattcacacttgttcttaaaaaaaagttgtagggagaaaattttgggagagaaacggtggaagaggacatccgagagagaccttattatacagtacaagatttactaggaacaaacaagtggagaggaatcttttagcaaggtggtagggaagagacttcaaagagaaaactcgcagagaaaatgctccgagaacagattgataagaaaaaggcatgaacaagtttgacaaggaagagcccttcataaggatgccattttaattttgaagttaaaagtagtaaaattatttttaatatatttattacgcaaacaccttgttattgagtttataagcacttgttgattactgaaagaatcaaagaattggtaacaaatttacatgatatatacattatgtagggaagacaagaaagatttcgagtttgaactcaacaaatgggtgggggctggagcgcaacgtgtgtttagtaaaagtagagaatgattagttta

SEQ ID NO: 28281 - DNA, 617 bp, Arabidopsis thaliana columbia
ttttgctacggaggtctctggaggccagggagacacggtttcatgagtcatgattgttatcttttcaaaaatatagatattattaatatgttattattttctcctatagtgttaccggctataaaataaaaaacttgagagttcagacgtattagaatgtgtgatttccatcatccagacataatctgttcaccatgtttgctgatttgaatttcaatattcgtaattataaatacataaattttttaagaagattaaccttgtaactatttgtttatatgtctatgtccatgtaaagtatcatattgtcaactaaataaagatgaaacacagaaaagtgaatgttgtaatgctattattgtataattgtagtttttgagtacaacatttagcaaatcaactttatttttgttaaaagacttatatatatatatatatatatatatatatatatatatattaaaattctattttctaacaacttttaaacaatgatttcttatgaaagaaggaaaatgtggcatgtatggaatttttggcaagcagtaatctctggtatgtaaatatgccttgcaacaataaggactaatcacccatcgcctattagatacggattg

SEQ ID NO: 28282 - DNA, 687 bp, Arabidopsis thaliana
tgtaaacatacggtgatggtggagatttgtactccaccttaggggatggcgaatagtatggtggtggtggggaactgtaaacatatggtggtggaggagattagtagtctaccttaggagatggtgaatagattggtggtggtggcgaactgtaaacatatggtggtggaggagacttgtagtctacctttggggatggagagtaatatggtggtggtggagagttgtagacatatggtggtggaggagacttgtactcaactttaggagatggtgaatagtatggtggtggtggagatttataatcaactttaggcgctggagagtattctagtggtggtggtggagaactgtaaacatctggtaatggaggagatttgtattccactttgggaagtggcacagagtatggtggaggtgagctatctgtgtatggctcatatgccgcaaccattgttgccatgatgataactcctatagcgtagacgagatgggcagaaggccccattttagaagaagatatcattggcaaagtatttcttgttttggtttgtattttaaagaatgagtgctgaggtttatatagcaaagattttctctaaatccagctatactttccatatttttttggactccatctaactaagtcgtggaagcatgtctacacgatactagttggagacgacg

SEQ ID NO: 28283 - DNA, 928 bp, Arabidopsis thaliana columbia
tggtatagggtttcgagttaaaattgactagtagtttgtggagtaaaatacttacatgatcctcaaagtcaggactagacaagttgatggatagatttctcatcaatagtaacacctgtttggtgggggcaaacaaaggaaaaaaatgattagtttaaccatttgttccattggaccgacgtggtttcaattaagattgatgtaaaagtgaaaactgaaaagacaagaaacgtactgtttcaacatctatggggtccatcttcttcagcttttgtagatgattacttgcatatgggtcaaacacacttccaatgaagccgtatacttgggcaaagtccggtaaaactgaaaaaaaaaaaggcggaactgtctagtaagaaatggtaaatatggtacaaacaaaaagattaacaggagacgatgtaacgatgcttacctcttaatgaatggccaacatttccatggtctcttgcgtccctgttggatcgtggtcttggagtattttcagaaactactagaacaattgttattagctcctgctcctgctgtttccatcaacgtggaacaacaatatgcttcatttagtaaaatttgaaacagagattatattaagagagtaacagtaattgcataatgcttgtaaatgagaatagaaccttttgggaggggagtgaagctaattgtttgcgcattatttgtccatggagccgcagcagcagtggttggcgaagtcatcagcattgaagaagactcaggcctaaacataaaacttgggtcatttggttcagatgttgacttgaatgaccctggtacttgcagttgcactgcacattgccataaacagtgcatcaatatagttttcagtaagcaaacaacaatacaacttcaaagtttttaaagcagtagctataacgtaccattcttgtga

SEQ ID NO: 28284 - DNA, 1007 bp, Arabidopsis thaliana columbia
aaaatgtgccgtttaccttataggtagtagtaacaaaacagaagaaacttgaaacaaaaacaaacatgtcttccgcattttgatcttataaagtcggccgtataaacacaaaggtctttcttcttcctttttagctctcacatttgaccaaaactcctccaatccaggcatcatcgttgactttttcaaactcatttcctctctttttccttcttctcacatcatattagacccaaacataaaaagaacgaagaatcctctgttcttgtctgcgaattttgctgttgtgatcagcgatggacattaagcatcatacttcaacttcaaaacctaagaacaagaacaagcttttgaagatgcttcctaaagcgatgtcgtttggacatcgagttccaccgtttagtcccggaagagatctccaccacaacaaccaccataattacacggcggctaacaaaatgtttttctctggtcctatggttcctttggtacctaacgcggctcgggttagaagaaacaaaagcgacgctgtttgggacgaacctacttcacctaaagtctcttgtatcggtcagatcaagcttggtaagtctaaatgcccaaccggtaaaaagaacaaagcaccttcatctctgattcctaaaatctccaaaacgtcaacgtcgtctttaacaaaagaagatgaaaaaggtcgtctttcgaagatcaagagtatcttctcgttctcgccggcgagtggacgaaacacatcaagaaaatcccatcctaccgccgtctccgccgcggatgaacatccagttacggtggtttccacgcggcggtgccttcgttaggtcagatgaagaaattcgctagcagtcgtgatgctttaggtgattttgattgggcggttgagatgaaacatgaagaagaatcaccgctgatcatcaccgtggttactattctgacgacgacaccagaggagcttacttgagatacgatgatgacgaggatgaagatgacataat

SEQ ID NO: 28285 - DNA, 681 bp, Arabidopsis thaliana columbia
aaattgcaaaaccaaatttttatggggttttcgatttaaaataaaaaaaatgaataacgaaaacagaaattgaaagggataaaagggaacgagttcaccttatgggattggagcttttagctctgataccaatgatgcaaacctcggaatccacctagggtttacgcttctcggtttgtcgacctaaagcttgaatgattcgatgaatgatggtagagatgaaagatggaggttttgttgaatgaatccacactcaacgtgcttgattgaatccacaatcaaaccacaaacaaatcaacttgaatccacaagctaattgatccgcacacacaagactttagtgaatccacactaacttctaatgcataaaactcaaagacactctttaaagaaaatacttgtttatttcgtaaaaggcttgaatacaaatgaaaactaaggtgagcttatatagaggctcaaacaatgttcatatgctctaaagaagtaaagaaatcgcaacaataaatgaaaatatggttgttggaactttaatgacgaaatcggccaaataaggaaagttgtgatgtgtcttgagtcttgacaacttgggctggaagtgatgtgattttgggacgtctagagtcattgtaggaagcttcttaatcccaaaagatgacaaaatagagttgttgtgatttg

SEQ ID NO: 28286 - DNA, 499 bp, Arabidopsis thaliana columbia
aatctaattacgcatgaatttgcttcaagatgatgtttcaatggtacaaattaccaattttatgaagaaagttttagtaatttttaccttagttctagccagttagtggagttatgttttggacctatgaattatgttggggacgaacttcttggtaattttatttctctggtgacattagaatgtatctgatatgattgtaggcattgagccaatgtatatcgtaccagagttgtttatcgtattgacctagagtttatggtgttatcaaactggaatattttcatatcagtgatataaaatatggctatgagtagtgtagagcgaactagaagtatgtttgcgtggatctaattgttttgttagcatgttaggatctagtattgtctttaatcaaatgtattctctttgctgatagaaactcttttattttttgttgtataaaggttgatgctgttgtctaccttgtggatgcttatgacaaagaaagatttgcaga

SEQ ID NO: 28287 - DNA, 525 bp, Arabidopsis thaliana columbia
taatattttctattgaaccttggattgggggaaaaaagcttacatattctgccttacatgcaatggtgatagattgcaggtgatttacgagagcgagggatttctgctgattattaccacgcagacatggatgcaaatatgcgcgaaaaagttcatatgcggtaagctaatatttcttaaaacatgtagtccgtggtgcttacttgaacccgagattcaaaaatccagctctgatgcagctcgactctgctcttgatgatcttgttattgatgtgcaatttaagcattgcctgactttttgctgtgtcatgttcacagatggagcaagaacaagttgcaggtcattgttggaacagtacgtatattctctgttatcattccattatttagtggtacaaggatctacgttaataaactctaattagtaaaataattgctttgcaggttgcgtttggtatgggaatcaacaagcctgatggttagtacttaagtagtgctaatttttgtttagttgatatttgatat

SEQ ID NO: 28288 - DNA, 529 bp, Arabidopsis thaliana columbia
ctttgtggggttacgcggcactgggactatatatgccccagtctataattttaataacttatttccaacatttattgattacacatttacgaatttttctcaagaattgatattttctttctgttatttataattcataatatgtttattaaaaaaaagaagggaaaatggctcattcaaaagacactgtcgctcggttgagtcttcatttgtgaacatctttttgctttggttttgatattgacgtggttagtagtttacactcgtttagattttttacatgatcatctattatttttattgtgtgatcaacattgttcctctatttctattaagacaaaaattaataatgttactgaaagtgatgaattgctcttttacgaaagctacaaaacatattatggccgtggtggtttggtgataccgtatttgattcccatctcgatcccaaacccccctaatccattttagacataagaaaattggaaccttcagaattgttatccgcaagtacgttcgttttgatgga

SEQ ID NO: 28289 - DNA, 504 bp, Arabidopsis thaliana columbia
tgtggtcttgtgggctggcactcctctcacgcatatcagtgagcttcttatcaacacattctcggtgacgcttaccaaggtcatggtttctaatacttgttggattgttctgtatccatatcttacagaattcacaccatttgttcccttgacttacccaatactgaaataacacaaaaaacaaactcaagatcaatttcaattacgaaacaagacagaggtttcgtaattcaaagagatttggagagaaaagatgcgaattttgatttacctcagtcatggctgtggatcaaggagatgaagattgaatcgaaaattaaacccagaaaacgaagttaccggaactataagatcaacttttaatcagaatcaagaactaagtgaagaaaaatctcgagagaaagagagagagattagaaaccctaattccttaaactcgaatcccaaactcgagaggagaagcaaaatataaaattgggggagaagaaatcggtttggtttgtt

SEQ ID NO: 28290 - DNA, 520 bp, Arabidopsis thaliana columbia
cctttgcgaggtaaaatatccctcgcaaatttgcgacgtctttgcaagatatttgctacgacaaggacgagccacgcaaattcgtcttaacgcgtcgcaaatcacccgcaattaacgagaaacaaatctataatatatttcattgcaatacaccaagaaaaaataccatgaaagttacgtatatatatataatatatttaaatattagctaaaatttactaaatatatccggtgagcatgaaatttatatgtctcaaattttttggctttgcaatggctttgcgaaggagttaccacataacaatagcacttccctcgcaaaatttactctttaaccctaaagtacttacaagtgttttgcgaacttcgattttctgttataaaaatgaatctaggaggccatataatctgacaagtcgaagatgtggtgatgcatgaagaaagtgttggagaagtttgagtataattctcaacccgagatgaaggaggaggtcaatacctatagttataatagaaaatg

SEQ ID NO: 28291 - DNA, 591 bp, Arabidopsis thaliana columbia
agagtagtcatatgcatatgtgtataatgttaattgtaaatgcaggttcatttggggggtataattgtgttaaagtttcttgtttaattatgtaaggtgagatagactcgtatttatattttaatctcattatcgaaaataaaataatgtatgttgtcatgttgtttgaaagaaaagagtagtgtaacactaacacatggccaaactatacgtgtcgaagttacatgaaattgtgagatgtgataattttcaaacaaagtttcaataagaagtcacaatcgtatagtttcgataagtttttgtaagaatgggacccactcgtatcttacaaaaaccaaacactccgtgaagtgggtcccatgtaaacaaagttaattaatctttaataaactgattggtagttgtttaattatcgatcactcttctagatttgtctttttctataatttaatgtcggaaaattgacaaaaaatcttattccgtatcattctctgattctagaaatatctctctaaattagggttttttctcataacaaatacagtgctaatttcatatgtaacacatatttttatagtttctgtaatataa

SEQ ID NO: 28292 - DNA, 512 bp, Arabidopsis thaliana columbia
gaatcattagttgaataacagtacaattctattataagtggattcttaaatcttgcatgtgcgaatgccgaatggactaatgataagattgtgatttagtgggacctttgttgctaatatggtctaattaaatcgataacgtaaaatttaggagaagcttcaaggttccactaatttaaaattttctcaaactaaaagtgtgacaaatgacaacaaatttagccgacatccacgaaataaacgtttgcatcaccataaacgaataatgcttcttcatatgcttagtaatattcaaaggatgattttcttgtatcttattcttacgtatacgtggattttcaatatttttactaagttgacaattgaataatatacttttattattgcaaaccgttatttgtaaacatatgtactcagcatcagcatcttttaaaagtatgactgatgctaaatttataacatcaggaaacgatttatggtacacgcatgattagtcatttagtccgaattta

SEQ ID NO: 28293 - DNA, 1277 bp, Arabidopsis thaliana columbia
atcaactcgaaagacgcaaaaaaaaatctctgataccatgatagagaacatgaatcaaagagatatgtgaaattttttctgtatttctcatcgtaccataatgtacaaatatgagtttatatactctacactaaaccgaataaaccaattacaatctaagttaaccggctaaaccggactgtctatatatacaatctaatacaaactaacactgatgacctaagtaaaaaactgaagatctcaaggttgaaactgacactacagacttaagtaatattcgagatcgtaaagttgtggcggtagttcccttcattaaacagagtctttatgttccaatttttttaatcaacatgtctgcttctatttcagcttatgcaatcttagcgcaacatggttgttaatcctttagagattgttcttccgaataaacaaataggtcaatcttagataaagaggttgttcgttcgaaaaaattcttttatgtctagttttttttagtttttttttctttcattttcctcatcagcttgaaagcaaaagaatgatattttcctcattaacttgtgacgcactaaatagatagttttgtttattagtcaacatgttgcttgattttatttttaaaaaatatatttattggaaaataagaaaataaactaatttgagtggtgtttgggctttaatcaggttcagtccagcctttgctattcctcccgttcctagtctgctcgtctaaacctttgtatcacattattgagtttgtttccttgctaagaagaagtttcgttttgtttgtttagatcgatggacctctaagtttacaaggccttcttctccatgatgttgtttgttgtggttgttatctatctcggttcttcgttattcttggtcttaagagtggtgatttcgagaggttaggcctttcctcttgtcgttgccttcttgatctgttttgataggatcatgttttgaaggtttctagtacgcagttggacgcagcagtcgatcgtcgtattcggaagtgtgctcgaggttcgcttaactcatttgtcttgcttaccgagttatgaagtgttggttcttggtttctgagagatcagctctcatcgtgatcggaggaggtagatgttatctttgggttggccgcgggcatccttggtaaatctcaatcgcatgtgctttagaagatttggtttacttgtgtttttgtggtcctttgtttttgttaaggtttaagcttgttgcttctttcttagttttgggtttcgacctcttgc

SEQ ID NO: 28294 - DNA, 474 bp, Arabidopsis thaliana columbia
tgtctgagtaatccacttgttaggtttaggatttctcattagggattcatatggtttaatagattgccccctgctaggttatctgtagaattcttcatctttaattgttcttaatgctagatctagattgatcacctagaacttgaatccagacaatagatatgcccgccataggtatctgtagttggatctattatttgatgagcctggtttataggtgtgtaataagaatcggcctatctactaaggtgaacaaccaaactcgttaagaatgcatatttaggttaataatctctcggcttctccggttattcttagctatagatataaggagtttcgcggcacgccacctggttattccataattagagtttgagtttaagaatggttcgataacaacctagctattattagatctactaaccaatagtttcaagagaataccctaagcctgatgtttttactttcttgtct

SEQ ID NO: 28295 - DNA, 216 bp, Arabidopsis thaliana columbia
acgtgtgtccgaggctaggctgcaacagccagaggggattctaatgatgagttgagtactcctcaatttgcagaggtggccatccatcctccagctgatagcgctatgcatggctcatcgttcaatgccttgtccgaggttagagtggaatgtgtcgcaaagcgatatgtgtcggactcggagaagatcagaaacctcaaaagcgtggccgccagc

SEQ ID NO: 28296 - DNA, 569 bp, Arabidopsis thaliana columbia
attaagcgttctagcggacaaaagtgtatcaagcagaattggtggtccaaaatatatatgaatggtaaaagcggatcaaataatgcggatcaatcatttattttagctaaaatatttactaaataataattaatttccaaatctatatatttacctataatactagtaatttgaaaataatatacataaatgatattagtaaaattattaacgttgtgtttcacaactgaatactcaaatattatatatatatatatatcaattagggtgttgttcgtttgatcagttgactgatccatctagttgcagatgacaactgatgttcgtttggacacaatataatggaatagttggacgcatcagttggctgagtttataaaattcatccaaaaaaaatcaaaatattcagctgactttgatcggtgcatccagatgcatcagctgcagtcaaaaacaggaaatgactaaaatacccctttaaaatttgaagaattacccaaaaccattccttatcatctgacgattctcgacatctcttgacaaagaagagaaatagatttttagagttc

SEQ ID NO: 28297 - DNA, 890 bp, Arabidopsis thaliana columbia
atccactgattcctagctttccagttgttgcgttcgaattcctattagctcatgtcacaagaaaaataagaaaaagaacgtgtgagtaacaaagtaaaagaaaaatttagactaaattctaataactactctctcaaataaagaggttgtcatagcacttagggatcaaattccacaaagttctcaaatcacacaataaactaacagtttcgaattaagctaaacagaaaatattgtgaaaataaaagacaagaaagcaattaaaattggttgtagattcagatgattaagacgtcgagtttagggaaattctcaggaaatatcagaatagtagatctagcagtaaattatgattattatcaaaccattctagaactcaaatcactattatagagtaaccggtgatgtgccgtattactcactatgcttaatagtattgatcccaactctcttgtaaatccttagaactaagcaagcattataatcaagtttgataagttcacctaagtaattaacgctagcccgcatctaaatactaggctcatctaagatagttccagtaatagatacctatggcgggtatacctattatcctacaatcaagttctagttacttactctagaactagcattaagaacaatcaaagatgaagaattctaaatatattatcctaacagggtttttggtctactaattcatctaaatccgtaattgagaatccccaaacctaacaagagaactactcagacatgattatcaaagaacaaaacatgtttgaataagaaatcattgtaagaaacaataagagaatagagttaagaaagatcttctctaaagggagtctacaaaaggtttttctcccaagaataaaagagataataagtgttag

SEQ ID NO: 28298 - DNA, 709 bp, Arabidopsis thaliana columbia
ttttacttaaatagaatacttaaaaagagactaaaaagactcgagaaataacataaagactcaaaatcttatacctaaaacatagataaaatcggtgaaaatcgggttattgatagcatgttgttaagactatcgttcgcttgttcttcggtcgcattctcggttggtaccagaaataaattgccatcatcggtgatcatccactcaacatggttcgcttcttcactagataacgggtcatgatgatcatcatcattctccgaacattcagacggatcagattcaattgacatatcggacttagtagatttactatcttcggccataatttgatcattcatggccacagacaaactgtcatcgtccgtactgctcggcggacgaaagttttcggggttgggcacattaagaccgtgcaacgaactgactgtgttgcttcctttgctagacaacatctgcaaaacgaggtaaacctatcccccacttagccatctaaaagacgaacaaccggaatctaatgttgcattctgcgacttaaatttactcgataaaatcatcgaaaacccaagtgtccacgagcatcgcataaccatgctctgataacaaaaattgtaacgcccccgaattgccctatggctagacaagccacgggtgacacagttacgctacagtgaagttgatcgatccaacttagtagaggtccagatga

SEQ ID NO: 28299 - DNA, 1049 bp, Arabidopsis thaliana
gtgatcgtttctgggatgagttgtgtgacggagatgcgcaaaactcgcgagcccttcaggggaagacatgaactcgcgagctcagcaaaattggaagaatgtaactgctgaagtgaccagtaattactctcggatcaccttttacttattcgctaccacagttgtcatcaccattctcgttgggtccatctttgttctatggtttgacacccgcaacgttggcaccttgcacaagttactgtaaggaaattttcgagtttatcgatttagtctcattgattttattgtttgtttatatatatgtattgataatgtgtgtgtatgtgttcatgactataggtatgtcttcttgtctgctgcaaccattacatacattggtttgctattcatttgcttgtgcaacgatgttccagtcccgagttatcggctaggagctgagggacggtttgggatctacctagctacaatggttgtcatttattgcatatcctacagcatcgaggactttgatgtgatgatggaagtgtcatttctggtgattatgtctataataggagcggttacaatcgttcaacttcattctcctgccgaggatttaaattccagccgaaccacattcatactatttctagggacgatgtctgctattctgggttgtgtagcgaaggattcttggatgtccctttctggtagcctctgtttcttcatggttgtcatgtgtatcatcaaaaccaactgcttggctgctgatcattttgaagaaaaacaacgagaacgccgtcgccatcgccatcgccttccccattcccatccccatccccatccccatccccatccccatccccatccccatccccatccccatccccatccccatccccatcccgaaccccttctttcagtttcgttccccatgtggattcttgatatagttgtatatcactgcttctatgtctgattttgttgtaataaccacttcggtttttactggtctctcttgaactgttacatttgatgtacggattgagtttagtggcaaatatttcttc

SEQ ID NO: 28300 - DNA, 679 bp, Arabidopsis thaliana columbia
cacaaatcattactggtagagcacagaaatcatatatggccggcacaacattgaaataagaaccatcttctctaatcaggaactaaaaaggaggcacgaaacctcaacgaagatgtgaacgcaaactaactctctcgtcacaactcttaaactcagtctctcgtcagtcgtcacaactctcaaggttttgttttagatttatatgtatgtaatacatgaatcttttgtttttgaacttatgtatacatgaatctaaaacgtgcatttttctaatctaatcaatatcttacctcctttttccaaatatttaatcgacatagtccaaaaactgtatgttcatccataattaataacaacaataggtcttgtaaaacccctttagtatgttgtaaaacctagcaaatctactagatcgcatctaacatatctgtttatcaaatttaacatgtgtaattatctagatttaaaagaatctctctcattttctaaaaaacaaattttatttttctttaacagacttttattttctaaacatcagatttaaattgtatttttaattatcttgatgctatatattgggaccacgatactaacagactttcgttgtcgcatgtaaaatgttttctttctgtaacagacttccaccaccaacttagaaaagtatctataaaacagagac

SEQ ID NO: 28301 - DNA, 947 bp, Arabidopsis thaliana columbia
ttcttttttaaaagagaggaagcaatgataacataaacatttttatagtgttttttttgaaacaaaaagttagttttcttcctcaaattcgataactaaattacaccataaatgagaatatgtttttagttaagtagttaaatccatttgattctaccttttttaccagagtttgactctactaagtcgtgttacttcgcataataaggattgactatgaatcgtgtcttgtttataaaaaaaagaaaaaaaaaattacacaacaaagttaagaaaattcaaatttattaatttaataagcatactttgaatataaataaatcctaaaactcaaactaataaaaaaagtatttttttgtgtagtattaaaagatgcagaatccgaaataatgtattttattgtagaagtgattcaaaagaccttatctcgtagtcacttgtagcattattggtttaaggttaaagaaaacatttaaaactctgtatacatcatacatgacatctttacaaattgcaaaatatacatttttaatcagctactctattcttaaattcctttaattaacgaggttatacagttcgatacgtttaagcaacaaaaagttcgatgccactaataatttaatttttgttctcttcttatcttatagattgttgcagcctgcaggcttgcagcataacgagttacataactatatacaaaggcccaatagacacctcaaaggcccaataaaaaagcccaggaaaaacgaaaacgaagatatgaagttcttctctaatccgaagcaagaggctcaaactcactttcacttgcacaaagataaggaaaccatgtctgtgtcagcgatctttggtaccggaatcgtcaccgttgctgcttctccggttctcgccaatttcaagttccaaattgggtaatggaggaggactagggatggtgatagagt

SEQ ID NO: 28302 - DNA, 799 bp, Arabidopsis thaliana columbia
acatcgtatattttgatataaaggaagtaatgtctatgaaaaatcccgacacgtatgtaacaacatttttgagaactcggtctctcgattcgcagttaactcgcatacacaatttatacttactgcttgacggatggtttatatagttgatcatacatacatccatttgaaagagcatgttggtcttaattgcatcaaacattcttatcaacacaaaatgatatacatggcatcagataaaccatcacgaacaaatacaattttgaaaggtaatacacacaaattcactaacactattaaggtaatacacacaaacattcttatcaatttcatgattttctattaaaatgtcattataaaaaaaaaaaaactgaaagaaattggactgaaagagaaataaatttaaccataattgtttggtaaaaatagtaaaatatgccaaaaatgagatttaagaggaaaataaaaagaagaaaaaaaaaacagctgtagtctacatttacatacaagtcgtggactaacagctatactactactaagtactaactctttctctctctaaatatcaaattcaatttaatttttcttctgcaaatggaaccaccgccttcttctctgtcctccaccgcggtggcttccacctccatctccgccgccactgctcctgttcctcctcctctacctcctcacgtgacttcttcttaccccgaatctctcgactcctcccctcgttctcgcaccaccgatggctgggatgaccttcctgctccttctggcggcggcggtggcggtggtggta

SEQ ID NO: 28303 - DNA, 490 bp, Arabidopsis thaliana columbia
atcaccacttcctctcctgctatccgtttcatcttgggatggctcttaggagcttgttcagactttttggttgcaggcgtcgttgcacgagaatccttcttctgcacagttaccccattataagtttaaggaagttctagtatattatatacagataagcgaaatcatggttcaaataactgattaccttgctctttgatgattggggaataggcgtatccatgcttgcaccttctgaattctttttcttagcatctgaatggactaacttttttccactgggctttaccatcatagtttctgcaagtggcttctttgcagatgtttttgctaaaccattatctgctttctcctttttacttgacttgccagtcttaatgccatcttcatgttttttaacattagacttcgtcaaatcttcttttgcaggattagttttcttcacagtctgtttctttgctggttgtgtcgaacagaacttacatcatga

SEQ ID NO: 28304 - DNA, 552 bp, Arabidopsis thaliana columbia
gccacataggcttatatatcccaacaccgaataaaattccccagcgtttgccatcgtcgtcccaaaaattcgtttttgcaatggatgagagtttcagagtgaggatagacaaggtttttggatctcttgcatcatcttctacgtcttcagcacctgtgagctctctctggtgtctcgcggaagacgagatcgatggaaaccaacggagcggagaaaaggaactttctgaatcattgaacagcttctcggataatggaaagcaggagcatgaatcagatgatttgagcatagatgaggaaaaaggaaggtctagtgaattgcagaagccgagtgattacgatgacgaagagtgggagatcaaaaactcaattgggatggactctactcttgatatggaggtatttatatctatagtctttttgtgttgttgaattgctctcattgatatttttagtatctccgaggctaagctttggtttttctatattttcaggaagagctagatgataatgacaaagtggcattaggtgaaaagtgtactgttgcatgaag

SEQ ID NO: 28305 - DNA, 639 bp, Arabidopsis thaliana columbia
  unsure (1)..(639): unsure at all n locations
taatttctattctcttcttctccggcagaagtctccaccaccgccgccgaagattgcgttttgctttttgttgctctttgttgatcgaactggttagtcgactgttattagttgtatatctgaaactctgaatctaaggtttatccgtttacgttagggaggttgatttaggaatggagttctcattacttattttgatttgaaatgcttcaaaaattagacctttcttaactttttctgcgtgatttttctgtgtaacacacctaatgtctatttgcgttttctttctgtgtgtccttgtttaaacagattctagagaagaaagttgtcttcttgagtgtctattttgtttgatgatggatgacactgtgaatgagcttctaagaaggaagaaagctgtcctaaatcatcagatcaagagtgatttggttgcaccacacttgcgaatcatcaggaaaaacctcaagctttctccttgctacaacagaaagatgtccaaactaagagtcccggcacgcatttcagtaactgtgcagttaaggttggtgagaagagaaagcggaacgagtgtggcggcatttgcaatactgagaatcgtagcatgactgaagatngtgtaaactaagtaaagcagaaatg

SEQ ID NO: 28306 - DNA, 820 bp, Arabidopsis thaliana columbia
agaacaatttgatatttcaaaacacaaattgacgttgagacataataagatataaactttcattttatgtttcatacaataataaaaatttcatcaatgaacattgaatacaaagccaaacttatgtatattgttaaatcgctaaacagtaaccaagcttatgttcatgcgagtgttagaaaaagccaagaggccttatgtgtgttagtgtgtaaacacttacgttggagatgtttggcgtcagcgatagcaacttgagatgagataaataagagaagaataaacaaagatacgcgaagagaaacgaaatttgatgtctttgtagccattaagctaggttttccactttctcaaaactccattataagacctatttatatactacatgtaaaatgtggtactatgagtctgaccgtctgggcctacggtccaacgcctggacatttccattttgccacaaagtctagtctgggcctaccgtccaatgcccggacatttccattttgccgcaaagtctaccaaactttgtgacatttaatattttgtgattatgtcatactccataatcatgtttgttactattggaatcacactgcactgtacagttcggtctccattcatatattttgtcttagtcttttttaacttcagcgtcaccagtggagaaatatcaaacacttaaaaatggtagaacagttttaggctgagttttaaaattttgtgtagttaggaaatgtaaaaattaataatgcgtttgtggtttgatgtcaacataaaaaaatttggagctgtaaatttgatcatgaatatttaaaaagaa

SEQ ID NO: 28307 - DNA, 874 bp, Arabidopsis thaliana columbia
ccaatgaaaccattagtttacttaatcccgttagatgagcttctctcttggagttttggaactattatatagaaaagcaaaattcagttacgaatgcggtttatgtataaaagaagtcacaaaatatcatcactgtaatattatagattgtaaacagagaaatacaaatatataattgtccgaccttatgatatacactactaagtactaacctacgcaaataataccaattaatcttcagcttattcggaaaatttcggctaattcatgttagatacggacaacgtcggatttaacccaaatcctcaatgcaaatgcacaattttctggtttgtttcgtttttattttctggttaaaaaaattcagattaggtttgattaaattaaaaataataaaataaagattgagaaatcactgtggtcttggttcagtcttttgagatagagataatttctgagccgagccgaggaagaagaagaagaagagatgggttttgtcttaatctgtacttgtcctccgtcctcgggtgtcgtcgtctctcagcttcaccatcaccaggtccgtcttccttcttcgtcttctgattttgattttctaattacacaatctgtttaacaattctcttttgtgggtcacaattttcagttctccgccggagtcaaaagcaatgaactttggtttcgtccgactcgtagaaccctaatttcgaaatcatcttgtttcaatctccctcaagaacccattctctccgaagctctcaaggtacaattatatagatgatgacaaaattgattcttttccagtaatctgtacttgggatgagttgtccagatagcaattaacaattgatatcgaattttgtgatgtgaatgt

SEQ ID NO: 28308 - DNA, 401 bp, Arabidopsis thaliana columbia
aacataaaattattaaatcttaaacaaatatccaacaatagatgaacatttataaatatgtatatgtaaaataaaacttagctcaaaattggtaaatacactaaaacgatgtagatgcgactttagaaggttaaagcggtcgtctaggcgtcacttcagcatcaaaatgactcgtatgatctaagcgaccgtttaaaccaattttttgaatactgataaatactagttaaaatcctttgttatccatttaatgatttatttttggattttagattgcatattaaattcttaatagatttgaaagtaaaatatataaagattcaattatgtgggtttgccatattagtttaaaattcatatatcagatttcaaaattaatgagaatttttaaatcacatatg

SEQ ID NO: 28309 - DNA, 621 bp, Arabidopsis thaliana columbia
gtgatcatcttctttccacatatgcaaagcttcttatgcacgctcaacccccggatccagaactgcaaaaaaaagtttgggctgtatttaagaagtgagacttgctaactttgttgtccttcctcaatgttttgcttgtcatcatatgtactgtcttttttggtaaccaaatgaagtttcctaaatgagttttgttttcgcagatatgagagttgtatcgatgtggagatacaacagagggcagttgaatattttgaattgagtaaaaaagggcctgcctttatggatgtattggctgagatgccaaaatttccggagcgccaggtttgtaaaattattttatgattctatgaaagttactttgacgggaagtttgtgctaaacgactttgatgctggattttttttccgtgtctcttccatagtcttcattgattaaaaaggcagaaaacgttgaagataccgcagaccagagtgccatcaaacttagagcacaacaacagccttcaaatgctatggttttggctgaccaacagcctgttaatggggcacaccacctttgaaggtccaattttaagtggaacacggtgagttcttctcttctaggcccaattgacgagac

SEQ ID NO: 28310 - DNA, 138 bp, Arabidopsis thaliana columbia
ataaatataatatatattattaatatatatatttataatatatatagatatataaatacaattgcttattgaattcatttggtaccataattttatgaaatgaccccaaaccaaagaacgtatcacgtctagctttga

SEQ ID NO: 28311 - DNA, 533 bp, Arabidopsis thaliana columbia
cgtttgagtttagattttcatatctctttctttattcctgaaacgcagatgaatctggatcttccacagacattcagaaccaaataaatgatgcgctgaaggaatgggcaataacaggtaattatcacattaacactcttaattttcatcatcaagtactttgtttctggatgcatttcatgagtgaaagatagtctaattatctccaatcatttgtagacaaaaatgaagcagatgagctcatagaagcaattgtaactaagaacattcaaaaagacttcgaaggaaatctccttctgaactcctcaggtggtggctctaatgtctctggagaaacaagcatgttagctggaacggcggatgaagatgaagcagctggtccaattgctattgccttcggtaaattttctcttttacagacatctaagcaatttccaggtgttaattattatattgggatactctcgactaattactgcttctactaaatcgattctcacagttaaagctatgtctctgactcctgatgaatt

SEQ ID NO: 28312 - DNA, 434 bp, Arabidopsis thaliana columbia
attgaccagcacaaaaaccatgtcctagttttggtccattgtttttcagttggagagaatctaaagatattgtggaaaaaaaatggagtgtggactaaggcaaaaatcattaactaatgaaactgactaacgtggaaaaaaaaaaatcaattagtgaaagagagtgagtgacttaaatgctaatttgttggagatagaagaagaatcaaacaagtgaagtttatatcttgtattagtttcttgattatggtggctagtggcattatcaagatttttgtaaagattgtggagatgtaacgggttttgaagaaacttaccatcaggtagtggatggactttattgcatcctaatgatgaggcttccttgcagcaaatgtgtgttgaattttggaagccagcagttccaccagaggatgtacatttttgacaagttt

SEQ ID NO: 28313 - DNA, 509 bp, Arabidopsis thaliana columbia
tttttttttaatttcggtggaaaagatttatcatcttttaatcaacgtaatatcatacaaaaaaggagattggctatccatttattataaaaatatctgtaattgagataaacctgaaatggtcattgaaatctcattcaaaaagagaccggttgtaaattccgtataaggatttacaaatgtgaaaaagtataggacgtattgttattttattttgttcgagtgttataattagggttacttaatggaatatttacatgggtgcaaaaaagagagaggagaatatagaaaaaaagaatctaaaaaaaaatacttccaaagagactacgaagcaaaacaaaggtaaaagagaaaaaaaaaagagcacaagtagccgtaagtgtactcaaaaccatagctgaagaatcacttgaagtttgaggtgtttccagtagtaattcaattccaaattgttttgtcattgacctagtgagctgattgattgagtgttgtgtattttgatgagtgat

SEQ ID NO: 28314 - DNA, 548 bp, Arabidopsis thaliana columbia
gaagcagaatctgcagcaaaacgccgccgcaacaaccaacccgcggaccaaagatctctctctccgatcttgttttcatcgtccacgtgtcagctggatcaaaagaagcagtggttgtgaaacaggggaaggatcttgtgtttggctcgaacgagcggttccaaatcgaagctgatgtccgcgactcgggattcaccgccgatatgaaagacgtgagcatgtcgtggaacgtcgtgttaaggaattacgaaagaatgtttctaatgtcggagactgttataaagtcattagattctatgattggatggttcaccgatgaacttccggggacaaagaaccgttactgtgacggtagcaacctggtgggagaagtcaagccaagttttaatgaagatgttcttgataaagtcgtgttcgctattgcagattcacgcaactggaagtctctgttcgttgacgatgtcttgagatatcccaatgttttcttgtcgactaatagttttcgagtgtggattaattgttgacaagtaactagaaattctaatgta

SEQ ID NO: 28315 - DNA, 569 bp, Arabidopsis thaliana columbia
acataggtcatttctgctcatgagaatatcaactcacacgagatagatttggaatcattgcataatttgattactagactagtgagtcttagttttattttgttacgccatattttgttttattttgttacgccatattttattttattttgttacgccatattctgattagtgagtcttatttttattttgttatgagtaatgatgaatatcaaatgtaaacactttaagttcatttaaatttttttcctatcaaaatttttttaacaaaaatttgttcaagattgcaagtaatcgaaactttgctgaggtttgacattagtgtctttatgtgtggcaatttcttttgaacttagtacggaaactttgctccttgcgttgcgtcacgtgatgagttcttgaatgtttttttgcataaaattcattcttgaatctcaataaggatcaaagcttgtgttttgcaatgtctccttgaacacctgatattgtgagttgtatgttttgtcagagaagactaaaaacatttttgttgcatcattcttgaataaagtttatttagaaattatttt

SEQ ID NO: 28316 - DNA, 392 bp, Arabidopsis thaliana columbia
tatcactgacaaaatataaataacggtgagtcagacccacattcattaataaaaaaataacacaatcgacggtgagtaattgacgagtttgcccttcccgacacacttgtcgccgtacggtactcagtcggacaacttggctccggagaccattagattacctaccgaatcctagacaattcgccatatcattcacttattgcatagtagtataaaatacagtcacaaactgtttatggaggtgtatccatatgtttggcaaaaagagggcagttaggacatcattatcattacgcacaatttgtaattcagttaagcaattagtagtatgcttctctggtatttatctcatattcttctatgtgggaattgaactcggcagaagaaagcta

SEQ ID NO: 28317 - DNA, 483 bp, Arabidopsis thaliana columbia
ccctcgtacctactccgtaataataaaattgcgcttgaaagatatatgggctaccatacccaacttatattctttatatttttcttttgcatcttttctattccttatcatgttcttatcttatgagttatgactcatcatataggagtacttcttcatcaaaaaaataatcatatgactcatcatagtagtactaaatagtgatatgtatactttaaaccaacgtttctggacctgactacattttatatacctttcttttaatttgaaatattcgtttttagaaatgaaaaaaaaatatatagttcaatctactcattttgtgattgaatgacgatttatcaattttcatatttgggattttctttgacgtcaaacctctttagggtccaaaaagttagggcttctccctacttctttcttctataaattcagtcaatcttcacacactctctaccatcaccaatctttacaaaaatagag

SEQ ID NO: 28318 - DNA, 613 bp, Arabidopsis thaliana columbia
cttgcttataaaattttcaaaaaaatataaaatttatagtaaattatgcaaacatggcaaaatcttttatccatagatttgaatgtgttgcaataatgttagtgactaactttgtaatagtcacaagagttgatacatcaagaataaatcagataaatatgaaaacagtcgttttgcgagggaagtaatccctcgcaaatttgcgagggaattgcaggcatttttctagaacacggacgcacgttgcaaatccctcgcaaatcttgcgagagactgtttcctcacaaatttgcgaggaaagtacgagtactttgcaatgaacaatatcaaccctcgcaaaccacccgcaaaaatctcgcaaatctttaccctaaaccctaaaatacatagaagttatttgagatctttgattttcatctataaatgtaaatctaaatgactgtataatcatacaagtggattatatggtgatgcacaaaaacatattatatatatttcaatattaacatttcattttgaaaatgttaacacttatgattcaaattattgaaacacataagtcattattgatggatttggggaaatgccatttgaagttttgagatgaattaga

SEQ ID NO: 28319 - DNA, 629 bp, Arabidopsis thaliana columbia
tgagatatgcatctctatcccaagggattggccgtttagagcgtgtattgactttattagtcggttcttattgcctgtatagttagattccgttaatgggaattagtctaggcttgctttgcttgaagatttctatcacgggagtgaatagatctgttgttgaaccttttgtctagagatagcttgattgcgcttgttaaccatccgaataggctaggataccactccatttgattaccccatccttaggaatttctcgtctaactgatttctcagttttatcgctatcgcttaatcgttctcattgcatgttttttagtttttgcaattactcgaccaacttactcgaccacacctagtgtctggcaacagactgtgcagtcgagtacagttgtctcatttcctgtctgttactcgactagcatactcgaccacaccgaagggctggcaacagactgtgcagtcgagtatagctgtttcatttcctacctgttactcgatcacatcctgcttctgtcatcaaccagttgtggtcgagtgattttagtaattctgttaaaatttttgttttctgcatgtttgcttatgactgttagaaacctcaaaaccgttattgcttggcttgactt

SEQ ID NO: 28320 - DNA, 858 bp, Arabidopsis thaliana columbia
caccacaaaataacccaaagtagtcaaattagaagagaatttgatgttaaaactgatcaaaggctttaagagaggttttgaaaaggtttgtatggagagaaaccaagaaattatggttcaattctgcgaattatagagagaagtgagagtaaaatcttgaaatgtttggagagaagaagtaaaattcgaaattattgagcaaagagagagtgtaagtgacttagcttgttgagtgtggttttatagacaagaatattgaatcctagcccttcaaacaccttaaatcttcacccttcatttggtcaagggcacatgctttcactatttgcagaagaatctctgatgggctttggggagcaggatttgatgtgtggggccaagtgaattcgaattcaaatttaaatatgaattgtcttgacctcgcacgtgtaaactcggccgacatactcgacgcgcgtgtcgagtacagtgttgggcctgatgggcttcttcttactcggcttcaggccgagtggtgcatcttcttgggccttttaacagtgaggcccatactcgaccatgggccgagttttttgggtcgagtatggttcagtcttgggcctttgatcaattgaagcctacactcggtttgtagccgagtggtacggtcgagtgtggcctgaaaattttcagaagtctttttactaaaacacttaaacaaaaatattaaaaataacaagaaagcaatatatacaaggatagtcatgggacttcctcccaagtgagcttgtttaaagtcactaagcttgactctcacaatgtttatgtagagaagatattgagaagaggaactgagaagtcctcacctcacttgctgaa

SEQ ID NO: 28321 - DNA, 530 bp, Arabidopsis thaliana columbia
tgttaaacataatacgtctaactttatttccgatattcttagctctagaaaattttcattcttaaaacatttaatattatcttgaccatatattttttagttatgttgtctgaataagatgaataaacaataattatgtctcatttataaattataactctctagtgagtcaaataccgactttatttccaatatactatagtaatttttccttttatttacctttttaatgtagtgttaataaaaccaataaagtatataatcatattatttttgtaactggtgacacaaagctggattttatttgcaatattataaatatggcgaaataggaaacgaattgtaagtaggtaacattataaaagggtgaaaaataataacataaaataaaattgtgaaaaataataacataaaaatgaagaaatgattttattactaaataaatttggtaacaaataaagttttagtttccgtttactccaatgttactatttttttcccccgaccatttttacacacagccaatcaga

SEQ ID NO: 28322 - DNA, 499 bp, Arabidopsis thaliana columbia
caaataataagacactttagccttaagatcagctctttagtctcttcgtacactcaaatattttctcaatttcgggataaacacacaagaatctcaaaaacaagaacaatagtaaaatgccatcaatagggaagtaaaactctacttgtcaacttcacagactgttgaataagatcaaaacgggaccaattcaacagcacaaaacgagacatagcatagatctacatttccaattcgaatttcaagcgatttaacaataacaacaataacacgatctcactcaagaactctgagaagatctcaattaatttccaaaacaaaatcctcgcgattccatttccgattcatatactttccaccggctgactaattctcaaattatagagatcaaatgattatcgaaaccagttcaaacttgcaaatgcgtattcaaaaatggagctagagaaatttaccggcgaatcaaagcggtggcaaaaacacagcctccggagttgag

SEQ ID NO: 28323 - DNA, 524 bp, Arabidopsis thaliana columbia
tgataattattgtgagattacaaaagagtaatctttattttatttttccttttctaacaccattgataattattgtgagattacagaagagtaatctttatttaaccgctctgtatagttataaattgtaatcaattttattttattttttatttaaattccttttcctttttctaattgatgtaagaattacttttataatgtatccttaatcaacatctagaattgtctttttcggtattctgtattcactattataaatacagtctttagcataatctaaataactaatcattaaagtaagtgaaagtctctttgatatagtggttaaccaaaggtttattaatatttttacatctagatttggggtttgagttttaaaaaataagattaatgatgcaaagcttatcgaatgtccaaaataccacatgtagagctgtttgtaatggtttgagcgttgtagagaaagcatgtcatacatacataattatgtcgatcacaaggatgtcatacatacataatta

SEQ ID NO: 28324 - DNA, 524 bp, Arabidopsis thaliana columbia
gatcccctgagtaaacttgagatcacagcgaccagtgagactttagcataagacctatggttcttccgtcactgtttgtgtgataaacaagacatggacttaatctaaacctatcgcctatgttgaatttcagatatgattccacctgaaactgatcatgatttcttgaaccatcaacaactcccccaacgctcatgccccagcccacttcatcctctgggttgtctgtaatagacactgaccatttcacttgcttttctcttgagttctgaatttcaatccatcccccaagttttgtagactcgtccattagagagtctaacttcaaagcaatggaactggacgacacatgattcatgtttctactcatctccagaggcggtgctgatggttcaggctccgtagcagtatggcgccttaggaaacttactggaactgtaatggctccaacagaatggagattgctagatgatgttaaaacttggtgacagccaatagagatagctttaaacttctgagaatgt

SEQ ID NO: 28325 - DNA, 404 bp, Arabidopsis thaliana columbia
atatactaacggaagacttgtggaaaattcgaatctattacaacatgtcaacatacaatacctttgtgtatgtaaactagacttggattaaaaatagttcaatccattcttcagttagagcattgtttgtttatattcttaggcttatcacgtatgaaaaagcccatcaaagctgacttttactccctcatctggcaatctctaggaagcctctaaagtcaacgccatgcctaacaataacattgaccaatttagccaagaaaaatatgcatcttttgaaatattggacctcctgtattcgatttgcagaactacgaactctttttgtatcccgttgttcactgttgttggcccaatgctttaagcccagttttgtgttgataaatggaataaaagtaatattt

SEQ ID NO: 28326 - DNA, 511 bp, Arabidopsis thaliana columbia
tcgatttgcagaactacgaactctttttgtatcccgtaggtccagtgaacatgtacatagctttaatccctgaggagtggtgatagatgggattccagtaatattttttcaacaattacatgtcagcaagttagtaaagtactataaatgacatggcgaccacatcataagctacggtagattttgaaagcaagtactgtgtacttttgacattttttggtctgattgtaaaagtaactgatgagatttagtaagaactgatttaaggaagaaacgagaagccaaaaataaaaaacatgacatcatatcactacaaacaaaaaagcccaattctcaaatcttttaaaaatcataaatcaccaaaaggaaatctaaatctcaggatcaagtggttgagccgaaaaacaaaaattagtgatgactccatcgttgttgaagaagcagagctaagcaaattaagtatctttttttttaagctctttcttggtctctgtctctcagacggaggtga

SEQ ID NO: 28327 - DNA, 540 bp, Arabidopsis thaliana columbia
cgatgatagctcgcgacataccgaaaacctttgtcaaaccttgatgcaaacttacatttcagtgagctccaactgttttcccttgcaggaagatgagtctcatgttcgttgttggatgatgctaaagttggcacaaaacctccctctatggctttctgaaaaatctcaaaatccagattatatgcgtcgaccttcctgtcacctggttgaactttaattaccgagcccccaatcataggcaaaatgcttgcaaatgcatcccagtaataaacaggctcatcaccttctctgaccaccataataggtgcttcgactttctcatatcgagcaatctgacaaacagcagcttttgcatctttctccatgatggtttcacactgcctaccaacccaaatgtatattgcagaaggtaactgaatgataaatgcacctcttgaatccagagaacccgggcatggatcattcaacagttttggaacaagatgcatagggtcatcaggagagtgtggagacattttgtacattctaagtaaggaggta

SEQ ID NO: 28328 - DNA, 237 bp, Arabidopsis thaliana columbia
cgggaaaaggattggctctgagggctgggctcggcgggtccagttccgtgccatcttcggccgaaatccgtctgttttacaacagtggctaagtacaaaactaaaaaggttggaagaagacgaggaactttgcttaactgcacttaaaatttatttatttaacaaatggctgtagatatgtataggggaaaagtcaatcgtatcaagacctttggaataatttggatcaaactgtag

SEQ ID NO: 28329 - DNA, 549 bp, Arabidopsis thaliana columbia
caaacattggtttcttcctccctaagttgttagcaaaacttcttctttcccttacaaaactttgaagataatctcctatgcatttttggagaaatctaaaccaaaatcacatcatccacatagtgatttccaacatctcttataataaacaaaaataaaaattaagcattaaaagcatgacgttttcgtgtcctcgagtatcaatccgtatctaaaaaccatccaagtgatcttttcccctttttttttttaatgtgtttctttctctaaatttatgcctctagaaaatttaagtaaatcaatcataaacgtttgaattttctcatctagttttttttttttttttgagttttgtttcgtctcatttgcacaccttctcagggatttttggacgtagagaaaaacatttcgtacgttttgagccatgcctttccgttccaaagtccagcctatcaacatcaatggtgtagggatgagacaagcgccgagatctcgactgaagcggctttttgaacgtccgttctctctgaagaacttagccggtgtaga

SEQ ID NO: 28330 - DNA, 563 bp, Arabidopsis thaliana columbia
ctttagcccgcctctgcgaaagactgaggtaagcaaagttgaagttcttggacaaacttcttcattaccccttaaactttgaaacttagaaagaatccaagtcaagtaaagctaaacaatgcgacttgatgtgtttcagggagcagttacttgatggggactttactaatggggaagaagtatattaaaaagcacaatccccaaactccgaaacaatttagtattgttggaagttattacaattggtcctatattattgagaaattgaagaatgtagcaaaccagaaattacattcttcagcagaactctctgtatcatttaacttttcaggacagatttcattacttgtcctgcctctgtaagatccagatattgtaattatatgttctgtacactagaatcgaaaataaaagctacatcttggtggcattgtgatctgttgaatgtcactgttaacttgagagtttatatgcctttgtcacaagctgtgtttgcgattgcggttagatctaaccacgtctttttgtacatgcatagacaggataagtattcaccagatgag

SEQ ID NO: 28331 - DNA, 1281 bp, Arabidopsis thaliana columbia
gagacaaaaccaaaaaaaactagctcgatttcaaaaacccaacatcgtttatatggtgaatagtacacatgcatcaaaattctccggggaaaaatcacaaaaaatctccattaaatgtctctcccaaatgtaacagatacagaaaaacctaaacataagtatccgataaaaaaaaatcaacaaatccaaaagagagcttgtggagaagagagaataacgaaattagtcaaaatcactcgatacctgaactgggctgagtctgatcgtctcgcttatcactcttagcaacgctcgtagtaccaccgacaatttttctatttatgacagtatctttgttagtctcggatcgtttgctcgatttcttactgcatccgaaacaacccatcggaaattgaaggagaaaagagtaattctcgcttgtcccttttctcttcttcttccttccttcctcgttgaagaaatcaggaacccagataaaacccaacaccaaaaaaccaaagagaagagaggaagaaaaaaaaaagtcgaagaagaaggagagagagagagcttagtgacaaacagagaaagcttaatttcttcgcctttttttatatcgcgtaatcaaaaaaagttgtttaattttctttgtttcagagagaaacgtatagttatcgtctacgacaaggttcacggtacattacatatagcgcgtctaattaaaaccagccacgtctagacaaatgtttcttcctgaggagaacagaaacgtacggctagtgttgaagacaaacgtatcagaagacgccacgtaatggcacgaaacacttgagcatggtcaactttttaatttgtcatctaccgtccgttggttcggaaacaagcaccgtcgatctgacgtggcgttaatggagcaatggatttgagtgattaaagattatgtcacttcttgataaaattattttcatactgccaaacatctttctagtttgtcaattttcagtattagtcttaaaaattttattagctacaacaaacacgttttttactcgatggtttgacaggtatggtagattaaattggattatgattatatttgattgaaagataagtctgatgatagtaacatttttgtagctgtcaccaatcgccttacgggtgacgtcggtgttagacgacggcaaaattactcaccgttttggaaatattttcaaatgaggtgaggaaacaaaaaggacgtcattgtgggtccacgttttactcacgcgctttgttgtcgaatgtgtttcaaaaaattattta

SEQ ID NO: 28332 - DNA, 654 bp, Arabidopsis thaliana columbia
  unsure (1)..(654): unsure at all n locations
caatgatctgaatccattttttacaacagcaaaaaaaagttaaacgtaaagaagaagagtacatttgtttcttagatattcttcaagatcactttaaaacaaggttaaaataaaaattagtatatctgtaacactctataagctagatgtatgcaaatatgcaaggaaggatcaggccagaactatacttcccgcttagggccatctacttcagttgtcaagtgtaaacaaacaatacctcaatggctaacaagattgattaagcgaagattcatcagcgaggcatctcttcgacttcttttcaagaacgtaaagcactactcgatggctgcgataatctggatgccattgtgtttgttccacacgcccgatcgcaaaatctttcagtgcggtttctaagaagtactcaagaacagcatctgacagaaagaacgagcaagcaaaattagacattgtgttcttgttatataagatgattgaaaaccacaaaaagaaaatgattaaccatttcgtagttctcctgataggaagattgtagtttgatcgctgcaaagttgcaaaagcgtttttaccaaatggtgaacagcttcttcgctgtatatacgacntgagcctaatactacaagtacatagcaaataaaagggtgtgagaat

SEQ ID NO: 28333 - DNA, 573 bp, Arabidopsis thaliana columbia
tgtgttatttctttttattgttgttcatattttgagtgttttgtttgtttttgctcagaaggtattatatgcacaagatttcattgaactgtatgctgcagataatcatcgagaagctcgtttatctatgaggattaagccattgtggaagttttggaaaacctaatcttaactatcatttgtcttaactaccaataggtctaattctaaaagacagtggaaataaaaaagcagggaagagaagggttaggtgaaggtggtctacataatttgcctggaaatcaagaaaagtaagagaaggatattggagcggaccatagcacatgaagatgaaacattctaatggggctcccattttaaaagggtcccacagaaattttattgtaattaaatatacatatatatatatattgcctttcaataggagaaatagttagttttatacatattaatcttaaataatagtgtgatcaaaatatttataaatctaacatacaattaaataaataattgagagttttgtttaaattggtttctatgtactctatagttttaaagacaaaagtactttgt

SEQ ID NO: 28334 - DNA, 517 bp, Arabidopsis thaliana columbia
gaagagatgagatatcatgtacaagttacaataatacaaacaatttcttgcgaattttaaattataattttcatagaataataaaagaaagacaacaaccaaaataaacctcgtcagttgtcaatgataagtgtttggattgtttcagaccttggcaccttgcaaagttgcaatcttgcattcttggagttggagtgtctaaatattttcttaatatcaaatataatatagtccaatattcttatgttagtatataatacacttatttgtaaacatagatacaaaatagatgatataataaacgtatttgtaattgtaataacaacatcccaaacattttgtatatggagagtgcaaaattattatacatttatcgttttaaacaaacatttaaacaattactatattgatattcatttagtgacacattaccctgatttaataattaaaaaacaataagttcaaaacgattcagaccgaaaaaaatgatatagagaacggtgcatgagaattgaaa

SEQ ID NO: 28335 - DNA, 762 bp, Arabidopsis thaliana columbia
gggattttctgataattgtgaagtttcgtttagagttgggaagctaaaattactaactggagctctagcttctttgtttgcagtgtaatcgatggaccgagtcacagtgtttgaagggatcgttaatcttattggctcaggtgaagatatcgtctgatgactatgaactattcggttcgagacgattcggtcagaaccggttttgggcactgcgattcttggtttggattcttggacctgaacggacttggagctagaacatggacaagccctgcgtctaaaaaaccatcttggtcctttcttgctgcttctacgtccatctctgtccgatccttggcggtttttgttagagagcaaaccggtttggctgttccagttagcttcagaggatgccgtttgtcccacggtaaaagaagacacttttgcagatgcgaccgaagaaaatcttggaccacttagattcctcgtctggcatcgactatcgttgcttccgttttcgctaaagtaacttcgagcttcgaagatacttagctcagtatcttcattctccttttgttgttgttcgttgttgtctggtttgaggtaagaagagaaggagacatcgatgtcgtttgatcgattctgaagaatcttgatgtaaggatcaagagcatctgcgtttggtcgcgactacagtgacagtagtttgcgccattgaagtatcttttgcttctttttctctttttctggtagaagttgaaaaacagagttgaagttagtcag

SEQ ID NO: 28336 - DNA, 981 bp, Arabidopsis thaliana columbia
aacaaagtatgttataccatcttattatttggtgattttattaatcttattagcattatatgtttagaagtataattagcccaacaaatatattccatttcaagttcattgagaaatattctcataacatgcaaaagaagctcaaaactgaccacactagaatccaaaatcgccaaagaattgatagagtcagtctcatcatagcttacacgagaatataaacttgactagataaagaatattaactttttcagctgttaaaagcactctagtgaatatattggacatacgtacttgattgtagtagatagacgtgatctttcacatgagtacaccatgcaaaatagaaacattgccgatttataaattaaaaaaaaaccattaaaagaaatcattccaaacccgaccttagcaataactatgttgatatgaaagctaataaataagttagagaaaaaaactaatgtaagtcacgaggatctcactcgccacccaacggaatgaaatcagcggcgcatttatcttaaaagactcgcaatgctcacgagtttcgcgacgccagccattactgagtggcatacccctgtaattaccacgacaataacgagggtaatcttggtataaacatgttttcttgaagtttattttatttttttaagtcactccaatcaattttgcctttgaaaaaaagaaagccatttgtctgcattggggactcatcacttatatatatgcgttactctcccttttttaagtgttttttttcttttgttcctttccaattatttttagcaataatcataatgataattttaatattttaacacaataatagcgaataaataatatatacatggaagcgcgtgggtccaaaccgtcaaattatgatgacgtggcaaaatctcgtgggaaattgaatgaaaactgtaaaagataacgaccgggtgcagagagagagagagaggagcagaagaatagaag

SEQ ID NO: 28337 - DNA, 519 bp, Arabidopsis thaliana columbia
tatgtatgatatatctatatgaattataggaaataaattttctgaaatattaggctccacctaataggctaatacccattgttatagactacccctaaactgtcgattacccatcctctgatatttttgttttattggatttaggatacatacgaatatatacgaattcgtaaacaaatatttgtaagagttaatatatatttcatatctatatctgattcagaatatgcaatttaaaacttacatttcagaaagtttgacttaagtaaacaaatttgtctagcgttttttaagaatggtgtccatgttttctataaaaaaaagatcacaagcttataatgaaatttcgaaaacctaattcggatcagtgtacttgctagtatcaaacttttccttgctggtaccaaacagatagatatatatatatatatcaaacagcccgtgagcgttatggctctatataaatacaacacgtcataaactttactagccacaacttaaagtattgaatacatggag

SEQ ID NO: 28338 - DNA, 303 bp, Arabidopsis thaliana columbia
tattaatcgtcccatttcgatattttatatagaattaatttaagggcaagaccaaagtaataaatacaaaaagccaaaagcataaagaaggtagcatattaattgcaaataagccaaaacatttcaaaggagtcaaaccaagtagaaagtcaatacccgaaccagctacgcttttctgtcaaaccgaaaatcggtttaagaccgataatccggttcagaaaaccaaaaggtcaacttaccaacctggtgcgctcttgacttcctctaattaccattatgaccctccctcacaaaagcagcgac

SEQ ID NO: 28339 - DNA, 548 bp, Arabidopsis thaliana columbia
ttcagtagcagattttgttgattgctaagaatcttaaggatcacactgccataggttataattgcttcaactattctcacagttttgtgaatgagagatttggaagtttaagaaatgcaaattttactactttttgttccacccaccgaagctagactttcaatggtctactgtttgctgtatctgaatcatacacacaggttttaactggtctgcttcatttctacggtgcagagtttgtgttggcattcattagtctctttccgttaggctgtgaggcttatgatcggtgccactaacgttactggctaagtcattgaatctgattaaaatatggccctttatggtacattgcagttgtctcatagtctgggtttgtgcagaaaccaacggttttgtaatccagaaaatgtatgtttcttccattttagccctgacatccttttcttttaatcatttcttcccttcatctttcgaaaaatgtacaatttttcagagtgccatgagaaggaggctgcatatatcaaatggtcctctctcattaggtg

SEQ ID NO: 28340 - DNA, 532 bp, Arabidopsis thaliana columbia
caaagttttatcgatgattctctcaaccttcaaccaatcgaccaaactaccatcaacaatcgttcttgtagttggtgttacggtaaaggcggcttcttttaagcttcctccattctaatcaacatacatatatgggtgaggtctattgtttttttattccttcaaacttgatgcaatcgatttaatatcgccatcatcggcccaagcacttttcggcagttgcaattccctctataatttggtttcgtcttgtcattcttatgtagctcaagatctttcattttcgaagtctccaaaaaataagtgaagactataaaaccgaaagtttagatgatgtccgttttcggagatgcatgaaatagcttctgattttagaaaaaattggttaactgaagaagaaagaagcaagtgataataattgtagttttgatgtcatttgtaacctgattatttggataatcattttctgttaattagttttgattatttgtcatctcgagcaataccggctttgtgtaatttctggtttcag

SEQ ID NO: 28341 - DNA, 503 bp, Arabidopsis thaliana columbia
ggacaacatgcttcctactctggtttcagacatgaagctaaaataaaatgggtatttggtcttttaacccaaaaattgtgttaatcaagtaaaccacaatgtttgagtgttaatttacttattttttctatatctgggtcaagctaggtaaattccagtaaatcaaactagtaaaagttgctttacaaactttatttcacttttctgtatccgattttatctttttttatctttttttatcatgctgatttcaatcattttaaaagatactggaattgtgttagctacttgatctaactatgtttaatatatttacggttcccggatgattgttgatgagatcgtgtttgttatgattaaaactgatcaaatttgttataacctaatttgagtagtactctttatatagcaaaccttgttattttgtggtttaactcagagtagtatttgattttgctgccttggttgtataaccaaatttattagatacagtttggagcaga

SEQ ID NO: 28342 - DNA, 520 bp, Arabidopsis thaliana columbia
tcggaaatccgaaagcatgggagataagactcaccattttaaccgatgaagtgctatcagagaaccagaagctcgccacccagaagatagatccgtcgtgcgccgtcgacgtctccatcggacatggcgcatctgacagtccaagagggagttctcttgccattaatgaggtccgatgtgagtgttcttctgggataagcgaatcagatctagaaacgaggggcttagcgatgataatagattttgtcatgagagttgcatcgctggaaagaagtggtatcgtccgagatattattaacagatggtgaagtgggagggaaaacgccggaccctattgtcttccaccgttgctaatcttttggcctccagtaatgaacaagagggatctaaggtttgcaagggttgagaaacggtttccaaaagggaaaacgaagctgaaagcataggagacataggagagacaagagaaaactagagcaagtaaatcagaagagttaactcgcgacgccggcgttttgca

SEQ ID NO: 28343 - DNA, 533 bp, Arabidopsis thaliana columbia
ttctatccttcaagacgatgctgacgtcagcaatcttcaagagtaaaaaaattatgagctctcaattatctttttttttttcatcaaagatcaaataaggtttcaaccgtcgtttagtgtttatccaattattacgacaacgctattaaaaagtttgatccctacttacaacaacatatatctattaacatgtccaggttacatacttcgtaatccggtttaataatggcaaagatctatatagtcttatcgaatagctaggttaatgtaagattaaatagaacaaagaaagctgacaactttttctttattgagatcacgacatatagaagcaagatcgttcttaactaaaccacaaaatgataaacataaagcagtagctgcatcaaagttcatagatagatagagacgctagacacaagtaccattacgagacacaaagcaaggtgttgttaaatcagtaatggaggatctctccttgacattaatggaagcgtttttgcctgggatcttagggacggtgatccagagca

SEQ ID NO: 28344 - DNA, 577 bp, Arabidopsis thaliana columbia
  unsure (1)..(577): unsure at all n locations
gtactaagtgaccagtgaaacatttcctgntgagaatactccttagctatacagtgattacgaacgggttatggtgtctctatgatatccttaagattgttatctcttcttacttagtctgagtcgctattagatacctcttctactggcagctcaaatgcatcaatctctgcaaagtaagctttctgcttctcgatataatcctgacaagctgcactaaccggatcctctttctcttgctttaccgtccgctgtctctgtaatgtaaccacaaatgcagaattagatttggagcaaacttatatgttaccaatagtcataaggctctataactgaacaatgggagttccaaattgcatatctcattaaacagtaatcccactgtatctcgtgacaatattctaaatccaacttttgaaaaaaagaagaatatacatgaaactgaaggactaggcaattcacttcaaactatgtgtagcactggtttcagacatgtggcagaagaacgttgtgaacaatcaatgttgaaacatacaatgcactgatatacactttgctagagcgataaaaccaatag

SEQ ID NO: 28345 - DNA, 611 bp, Arabidopsis thaliana columbia
  unsure (1)..(611): unsure at all n locations
ataccatcattagtcctttaatatatcactccaattttggaaaatgaaaatgagtcataaacctggtgatgttggaggacgtaggcagcgtaagagaggccgccggagtcggttacaagagtttttccgacgtccgtaagagagtatttcctctcaatggatccaacaaggtgtttcgagaagacaccgtagctggtgagcatccgaagtatacgctgaagattctcggggtcgccaccaatggtagtgtgagatggtaggtggaggcgagggaggatctcggcggcagagagaggagaattggctccgccgttccaaatggcgtcggcaatgcctagtcgcacggcggcattgagagacatgggaacgctaatcatgttagcaagctccataatggcaagacgagctctgtttctactctctgagctttcgttctccattttttttaatcttcctcgtacgtgaaagtgaaactacacatcgctatagaaccactagtattggttttatatggttttatatggtttttaaggttaatgttcagtgtggtccatatggaatgggatggttttagaccttagtctantatttagaaatcaaaaaaaaataaa

SEQ ID NO: 28346 - DNA, 494 bp, Arabidopsis thaliana columbia
tcgacgattcctcgctcttttatacatctatttattttttggtctatttaactatatgtgtatgtgtgctaaacttgtctaatttatcaacttttgtttggtgtgtaaactaaccacgtttatataaataacgtctatgaccttgattatttttgtacctttgcctacacgttttttttttcttctttttcaaacagactcataagcttaattgtaaacgcaaatgtcaaacgcaatgaaaacatccaatttggttggcgtttgcgtttgaaactagtagaagaagagttgtttaattagaagaaaaaaaaagaatatgattgactacaaaaaatataattcctttgaactttgaagggtaaagctaaaagctacttcttggttgttatataacagctcatctaatccaattattgaattcgtttcaaaagaaacataattttgttattcgaaatttattaatttaattaggcttggttagacattaagttcta

SEQ ID NO: 28347 - DNA, 643 bp, Arabidopsis thaliana columbia
ctctaaccatggtttataatccgtacgtgttgaaaaagtttcaaggagagaggtgatgactgatgatattgagtggacgaaggacttacctcttttggtcactgttaaaaattggtttcttgaattactggttacaaaatttcgttcgttgctgaaccggaaattgacaattttggttacacagaattgggaccaaaaatatctgcatggtttagtatttgatcatataactacctataaaaagactagaaatattttatattgttagataattgtgaaattttgaacaaaaaaaaatgttaagggttaaatatggtcttttttactaagttttattcatcggtttttctaaaatgttactactttgggtaaacaaaagttaaagcagttgcctgattacgacacgttgaacaatggattgatcttatgtaaatttaattgataaaaaaacagttcatgactgcattttgcagctaattccttaaacattttgagctaaaatttgaaactatcatcaagaacatgaagtaattagtcttaatccgatatcataaacggttcacacacacatcgatttctttgtaaaactaattattgtattcagggatgcgatccgaaactttaacgcatttttatctatgca

SEQ ID NO: 28348 - DNA, 547 bp, Arabidopsis thaliana columbia
tttgaatgcttttcctaagatatgagtcttcatggtcactattggctgtatgagcattaagtttttcatggttttgagatttcatagtttgagtctttgagacatgtttcttggtagttggtactctaaggaagataattcctttagatattgaagtggaccaacttcgttataaatgatcatgtgaggtatgggggccagccacattttacaagtcaatagatagctctcgccctctctctctctatctctcactcacactctctctctcccatttgcctcttgtcttgtgatcttaatatctgaattcttatccttttgcctgctacagtcagttctaaggtgacttattggttggaatatcgtggttttcacatgtaatgctacagtatattatctttaatttatgcatagactgatttgggaaacgttgccctgtttaagagtcaatgttaagaatagcttatgcttgaaggtttaattggaggctcttgcagttgacagtgtcatacctattggagatagacttcatactcacggtagagta

SEQ ID NO: 28349 - DNA, 523 bp, Arabidopsis thaliana columbia
catatacgcaattgctaaatcaatgacgattgatttgatttggggaaccctaaattaggggggattactgaatctcccaataaatggccataaagaagatttgagttgatatggagtacctaccacgttatgaagaacaaagttcaaaactttcagatttgagggaaaagcatacgcatatttttgcacccaatatttcgtaattttattaaattttcggaaaacggataatatacaattcagtatgataaagctcataaattttagaaatgttttctttgtaccattagagatgcgttgaattcagaagggtttagcattcgtaaatatcgtaaccatgatctatattcatgatgatcatatgatgaattactacttgccaaaatgaaattctcatgatgaattacgttgtacaagtcatagctaaaatgttttgttatatttacttgatgatctcacttaaacctataaatgcaagcaaaactcgcatgacaagaaagacagaaagaaaactgtgaagata

SEQ ID NO: 28350 - DNA, 566 bp, Arabidopsis thaliana
catgttgtgaagcaaagggttcctgaagataaataatgtctacccaaaatcatagttttcctgatcaagaattattaccagcagagttgtttttgggaccttgaagctccattggagaattagtgatgctaccaacagaacccattgtctgagagctaagctgtggactcgctggacaaccctcgaggttgcttgtgctcatgggatgcattgcacccgagcttatctgaggactcataggagttctttggttcacttgctggggactcattggagttctctgactcatttgctggggactggactgttgtagctgctgttgggtaattccagctgatggtgaccctacttggggtggtgatagtacagactgaagaggggatgctgttgcctgctgctgctgctgtgcttgttgaggctgttcatgttgttgtagctgctgctgctgctgcggagactgagctagctgctgagatggctgagacataggctgctgtaactgttgctgatgctgcaactgttgttgttggggttgctgctggagttgctgctgctgttgttgttga

SEQ ID NO: 28351 - DNA, 959 bp, Arabidopsis thaliana columbia
cccagttaatccgttcgttttcaattttgttccagcgtttttttttaaaaaggatcttctgggtaaatgttggtttttaaaataagttcttaattgtaattctctttttattcctgtgaaaatgagaagaaaattagaacaacctaatgaagaaacaatgatgagatacttgcagacgggcggtctgaaattgatgtcgtgttgattgtctgccataagctacataagcattctctgagtttctcattcactcgtgaacacatctgttatgtcttaaactgttgagattgtaatgaaccagtgaattagttaactatacaaagagtagacacatacatctttggacaggtgtaacctcttttaatatgaagaacggctacattgaaaaggatgaactgaagtaaccgtaagccaaaacatccaatgataataagacttttgttctggttattaattagtcttataatcaataattctacagttctttaattttcgtttccaagttccaaagttttaaatcattagactttggtcagactataaaacgtgttcaaggcttgtgtttgtcttttatataaacgtaaagactgtttggacatgaagacttatttatccaccgtctggattatctacacacctaaaaaaatgatagcaatcgcagccataataagagagaacgcgttagtaaaagtcaacacgaagtcaactcctttgtggcttttagcccatcccacttggcgctatttaagtaaaatcccagtattaccaacttcaaaaaagtctctctttcacattgatcctgtgttttataaaaccgaattttgattcagagatcagctcaaaaatgaagtttgatgaatcgaaaacgctcttaccggtgagaaaacctgtaaatggcaccgcaaaaccgctggttacaagctttgggttctaatcgctgttctactcttggcctttgg

SEQ ID NO: 28352 - DNA, 523 bp, Arabidopsis thaliana columbia
ctctttaactaccaactcatacagtataaataccgtagttagctacttatacatgtcgtatacgcttatactactcagattgaccggacgattcgtcaccggctttcgtgtctagggtttaccgacagctctctttttccattgggccctatcataatttatccatcaacagcccaatctttttagcgccacgcataaagcttggctcccttttttggttttttttctcctcgttttaaatgttaaaactaggttgttttacttgtgttttgatatttttaactattgtttgtagtacatgtgtttgattcaatttagtttcatattgccatctttctgcaattcttttatattttaatgtagattagtacataccattgttacgactttttttagtttatgttggtatttagaagtagccaggttatgacttgtgtcatatatcatgtgttattacatcatgcctctgttcgagactacgtcgccttcatccatcactactcttcctgtctgtctgatcgga

SEQ ID NO: 28353 - DNA, 567 bp, Arabidopsis thaliana columbia
gttgtccataagcaattcctcaaaattttagcgttttgccgtttacgtgtaagcaaattcatatttatgattatttttttggcagttgtgatgttgagataataaaaagctccttaaacttatctgttaaaatgaaatcacaaaagttgcagaattgttttctccaaagctgtattttggtcaattgtagatatcagtgactgttatagcggtatttactattgggtgaattgtgtttaaatagattgtaaatgatatattagtttagaaaataattaaataatttttaatcaatatttaagaatcttaaaaatcaatcataaaaatacggagagagtagataacaatagtgttttaaaaaattgtcaaaataagatgccattgtgtgcctttttcaaataaatgttttttgaaaataatgtgatacaaatcataaaacatacttgctagcacataaacaaaatattcgtaggaaaaaatacttgaaatccaagtaactaaaaatatggagtaaatattaagcttatttacaatttgctattttgtaacataatgtggttgttagtg

SEQ ID NO: 28354 - DNA, 615 bp, Arabidopsis thaliana columbia
tatatatctgcttattttaagtaagatatatgtttgaacttgaatgatttacaagaaaagttatgtttcagtttaatattggttcttacgatatatacaaataaaacttatgttttcggaattgtattttatttgtttggattgaattgggtgtgtacgtgagctgttgtgtcaagtgttagcacagcttcaacgacatactccacctgatttcaatgtgtttattatggttcgtgtcttttctttcttcttctatccctctcttacgcgtttttaatcatcaacttcacaccgacgcttcatttattttctattattagtattaacatcttccctcaacaattttttttgttctgtctccataataatataaatactacaatggtgtttgcattaatacataggttgctgcgtctttatagattgtcttattcattagaaataattcataacgctttataaatctatatatcaatgagtttttaattttcagtcaccaaccagaccgcaacacatctgtcgaaacggatacccaaaaagtctaacgaagtcttagatttctagacaatcagtatgtgacagggcacatagctttaacatgcagaaaggttatag

SEQ ID NO: 28355 - DNA, 614 bp, Arabidopsis thaliana columbia
tcgagctagctaaagcttacagattctggtttttgttatccttttaagatcaaccttgagtttgttgttttacggtatttgcaattttgtatttgaagtttttctgtgaaaacaaaaatggtggtgatgatgaagaaaaaatgaccttttatcacatgattgagattttttaatctcgtgattacctttcaagcacttctgagccaccttttgatttttttgttctttatagaattggttgtaattgataagctgaatttgctagccgcattgatttggccatgaaatgataaaagatcgatttttttgtttaatgctttatttctggttgaacttgaatctgattatttgacgatgattacagaattaacattagcaaactagaaaacttatctgcttgtcacatctgacgatgattaccaaattatattttgacacatgggtaatatggaaaaaaggaccgtaaatgagctgctttagtgtaatatacaacattaacgattggcttttgattatacataaacttgaataacaaagacccaaatattttgaccaaaatgagaaagcccaagagtattaaagatttttgagataacaacattttaataacgcac

SEQ ID NO: 28356 - DNA, 566 bp, Arabidopsis thaliana columbia
taacggccgccagtgtgctctaaagtctcgagtaaggcgatggtgaatgcgcatgcgaacgcagatgcccgttctgctggtggcgagagtttggggctttggactgtgacagtgaatgaggaggatgaggagggacagattttgggaacggcgaggtaaggttgtaccgttgttagatatcgtatttctttgcgtgcatggaatgggacctatacagtatctactttaccagatagtatttcgtctactacggaactacttgagcattggtttgatggaagggaatggaactggatgtacattaccaatggaggttctttcgtttcgtctagtctttactcagtattggatagacatccttatattcttgtattccagactacatttaatgctcgcctccttcggtatttgctcttaccctagtctagagacaggacgccttgaagaagtatgggcctgatataaggcgttggacatcaagtcgtcaccgctgtttggattcgattaggcaggaaagatcggtgccataaccgcaataataatcggtagccattacgattgagtta

SEQ ID NO: 28357 - DNA, 1338 bp, Arabidopsis thaliana columbia
tgatcaaaaaatgggactgtgatacttaaattcaataatggagcatttcaagtaaagttgttaattttattattctcttcccccattttcttatctactgtttatttctttattatgtgtgtgttttgttttttcttttattttattttcttcaatgttaaggcaacaactctcttataacttacttgttattattttaatccaactaattttgtgattttaatcccactaattgttcttatttttgtgatgattaactattaaatgatcttttttaccgcaaggataagagattaccacctacaacacccatgtattttctcatctttttgcaggcaaacacattattttcacaataacccatttttagaagaaaatataaacaattaaaatattaacaaccaggataacttttacataagaaagtcaaaaaagtgggagacgcagaagaagtccacgtgacaaaagtacagatcacgctcacgtggtttacgagcgtaagcaaatggctttttccgtaatttcatcaaaagagagaaaaaaggaagaaaaaaaaatctaatcttaaggtcggagaattcatcttctatcatcaaaacagtgtgaaagcgaaaatctctttcaagagaacacgtgtcggaaaatgagtggtcgtaacctgtattaaataccctacagaagaggctaaggttgtctctgcttgatagggtcccttcttcttcttattacatatcataaacctcatttccccattacaaaacctagaactccttctctcttctctttcttcatatccctgtctaaagggattattatgatagtagagtctcaccatcgggctcggattcgcttggtgcaggtcgggaaccaattcggctgacacagcctcgtgacttttaaacctttattggtttgtgagcagggattggatcccgccttgcatcaactgaatcggatcctcgaggtgtaaaaaaactcgtaaatcctatcagatctggaagatttctacgcttctccttctttatattcgttttcttatgctttttatttttgatataacctagaaaaaggttttttatatctttgaatctgaaattgtttgttttagaatattgtatatctgatttttatccctttttatatttgaatgttctttagtctccttttgtttgcccaaatgttgaatctttgctttggttttgattttaaagccaagtgatgttgcctttgtttcgaaattttaggatttgtagatgtaggagtatgaggactcttgaatttaagatctaggttttaaaatgttagagattgttgatgtgattagttctagatttattg

SEQ ID NO: 28358 - DNA, 417 bp, Arabidopsis thaliana columbia
ctagtaacgtccgatccctgcaagctatgaaacttgtcagcaacgaatgtgatgaagctagagaactcaattctataacttctatctctagagacgattttagagatgacactcgagcagagagcacttgtggtgacagctcagcacggatggctcggtatccattgctaccaaattacgactctgagcctgatacagagagaggattatccacatcggaaatgtacacggggtcagggaggttcgagagacagtctaactcgggtcacttgcactcgggtcgatgcaagagtttctggcgtaagatcgacagattatcggccggaagcctgggtgagcatcgaagaccaacggtcatgttacgatccggttctcagctgacaatcttttgcctacagaacgctgaagagtttttga

SEQ ID NO: 28359 - DNA, 1111 bp, Arabidopsis thaliana columbia
cgatgtttactggatctgagtgcttacgtgctgatcaaagtgcaggggaccctctttatgtagcgggcggccaaccaaagtgctttgatcccgatcttgtagatgatgccgcagcctttgccgaagatgggtacaaaattagatcatcattcttcatacttatagtttctgtataccttgagatgaacagtccttggaaattgaacaatatttgagctaaccaatgttgtacgatgcaatctagtacgtagtttcatgtggagtaaattggtctgttaactagatgctatcacctgttatggcatgtgtcgtcattatgactgaatatattgcagaggttacagaaggccaaatcaggctgttcctggggattgtggatatcatctgcatgctcatcaagtagagctaccaaacctgctgaacactcataaggtaactcacgtagatcatacctaagcctcagtggtcaggctctttacgagatctctcagtccttatctaaacaatccaattgttcatgtccttaccattctgcaggtagtaaaaattgtagcaccgctgccaccaattctccaaacaagatgtgagacgtaagaaaaaggtttatcctcctgcaagtgaagttgcataagtctttcactgtacaacattagacatgcttgttcatcaagtgttatcctttttgaaaaacatacagagagctaagcttagctcttagatctctctgttattatcagtaacattacaaatacaaacatcagctatgaattttctgcaggcacctaactttagctgaaccaaaaaaaaaaaaaatgcctatattaattgacattctaaattaaaaaaaaaagatgttaaaagagatataatacagataggttgacaagcaaagaatatgccaatcctccaaaacaaactaatcatgaccctaagaagctttttcattcacgtggctgcctctgctacaccatttacccctcctatgttaccttcatccttagcgcttgaggactcagctctatcttcgttatgcttaccaaagctcaaaattccaccattaacatccaccagaatctctttgctgttaccaacttgctgctttagatgcgtg

SEQ ID NO: 28360 - DNA, 549 bp, Arabidopsis thaliana columbia
tgaccttccgctatttattaattataactagcgcttttttcctgctactatgttcgtttttatggcaattttgctatgttgtatatttggtaatgatgacacattatatgtgctgttggatattgttttgtgacattatgattctcgaattgtacactattgtagcgtaaaactatgctataagaaagtgatttgtagccctttggttttgctactgtgtagtatttaatagctattataaattgtcataatatcatttacaatagcatctattaattgcgatttaataatgttttagcctttttatcgtgctatacgtgctataatatatgatttattggcttttatattgtactatctaatatttattttgacagtgagaaaatgctgtgtatatatattgcaagatatatacttttaacatatattgaatctattttgcaatgaatcaaatataattggttgtctgaaatattgaattgcacaaaatataattagctttaatttatgaaagacaatgaatcataaaatatcatattacataaagtt

SEQ ID NO: 28361 - DNA, 620 bp, Arabidopsis thaliana columbia
ccctatgagataatatatcttaacatgttttcacgattaggcattagcgcttatgaacgagattccagtaacctcaagaaaatatcaatttgccatgggaatggctgagaagatcatggaagacaacgctcagagcggccacgtggatttactagacgtcaacagagcggccctagcttcctcctttgcgcgcactactgcgcgattgcaggactgcttgaaacgctctcgaaccgctgacgagcccttcggtggtttgcctttgcgtgtggtcagcgccctccctctgggcggctacgttgcctcctacgtgagagggttaagtgcatgtatcaacaccgtcaggtccttagcagacatgactgggaacttgttatcgcagactaggaggagagagtctgcggtggtgagagcgggtggtatcaagaaaatgaggctgaactagcggtcgagaagcttgcggaggagctgctgtggatgacagagaagcttaggcgttatggtgcggtggcagaagggattaagcggtggactacgcttccggtttagcttccttgtctctcacggctgctcccagggttcaaggcctcatggttaagatttcgggtaaagtatatgta

SEQ ID NO: 28362 - DNA, 571 bp, Arabidopsis thaliana columbia
gaattggtgaccaaggcgctccagttagtgtcctactgtccttgagcataatgtgagttttcttactgtcctcttgagttcttatcttcgaagcttgaattgtatgtattctaaaagacctcaagcattgacaaaagcaagtatatgttagccctttaaagatattagaatgatttttcatgttctagttttgttttcctggctagaaaaaacattgttgcaactggtgaagaactctctcagcatatgcagactcaaaaatgttgtatttgcatatctgttgggttcaacattcgaatttgatggctaggttagttacataggtcattctcagaatgttgcattcatatttagttttatggttgccatttatttgacatcagtctctctattgtgacactaatgggcttggagtttcttgagttgtcatgaattttctttatcagtcaataaggtagtagtaggtaatactgatattaagcacaatcttcatgactcagccgcttagtacatgcttttgagtgtttattctgaatccaaatgatctttctcaagttcaaacaatatttat

SEQ ID NO: 28363 - DNA, 565 bp, Arabidopsis thaliana columbia
ttatttaacacagtaatgaatcatatttaaaaggggccaaacttgaagattctttatttttcttttagcattttaaaccccaaggcttgatcaatctcaaagacttttaaatacatttgattacaaatatcttcagatcatactactaaatcatataatgacttacaaagtgagacattaaataacgatatttcaaaagataataatattaaaaagaaataatttgacttttctcaaatgaaaaattcaaattatttattttaatattacttaaaaatttgggtcaaattatgtatttcttatgattaattttcgttgagaaaataaagattataaaaattcacgcgctttcgtttgggcaataaatagccagctctgctttggtaggacccaataaaaacacgaacctaactcgtttctaataggcccatacaataagcccactacgagactaaatacaattcacacaacaccactgaaggcacgtgaccactcaacatctctcgttcgcatctcttctctaaccaaagctagatcttcccatctccctgcgtctgcataaacg

SEQ ID NO: 28364 - DNA, 556 bp, Arabidopsis thaliana columbia
tgtgtgtttcttcactcgattttttttttgaaatccgagattttttgttttttctggggttgtctatgtgatttgattctagggctactgagagattgctaattttgtttcttgtgtgtgttgattagtggtttgattttgagttaatttgtaattaggagtcttgattttaagggtttagaaatggttgcatgttcttttggattactggatcttatctgctttaatcccaggtttttagtagaaatgtgaataaaattacagtttcattattcagtttttttcttggattgtgaaagttatttgtaaaaaaaaaaagtttacatttttgaaacttgttttggttttggttaaagattttgtttatagaacatctgagatttttaacttctcgttactgtgatgatctttggtgttgtactgtcaattgtgtgtattgacgattttcacctgtgttttatatttactgtctcagaggaactatagccaacactagtcactgcaatatcgagcttggagaaatggagaaggaaagccatgaggagaacaacacact

SEQ ID NO: 28365 - DNA, 922 bp, Arabidopsis thaliana columbia
taaaacttacatcttggaaagccttagcatgaatgtcacaggtgctagaaagcatggcgcttccagcaggggctgcagatgcagaagcagcctcaacagcctcatgctgaatggttcgtggacccatcacagaatcaacagccctgtgtgcaactgcacttccagtaccaaaagccatacctatttcccaaaaacacaaacaaacaggtaaggaaagacgattccagacaaaacaattggggtcgtatatagagagacaaataatagcttcaaaattaaacagaaataattaggctgatttaccctgagcaatggttgaaccaatgcctgagaacatgccaccaccaccaccgctggcctgagctggagctggaggaggtgcacggtgtactgcaaaacaaaacccagaaagaatgatttataaataattgaatccagcggaatggattgaataagtcataactaagagcaaaaaaacacaatttcggagacaaagatttgtaccaggttgaggagctgggctgcgtgcagcagcaggacgagggcgaggggcagatcttcctgcacaaatgaagtcaaaatgagagatatatcacaaaaacaaggaatttttttttttgacatcaacaatgaaatcaatgacaaccatgtctcgaattggaaactaaaccaagcctaataccttaagaatatttgattatctaatatccgataaggtcaataacaaggtaaaccctagatcggtgcgatacacgcataatcgaaacgaacccaaaccaaaacaaaacgtttaacgtcatcatccagagtcaatagaatcggacagatagatctataatcggaaagagaaagaaactttacctcctgagctacggcgacccattttgatatagagagagacggcggtgaaacgaaaatgaga

SEQ ID NO: 28366 - DNA, 1214 bp, Arabidopsis thaliana columbia
catgtaggtagtcatcaccgagaatccagctccgaatctgtgaactgtattattattatgaatccgtcgagaaacttgttttcgtgtttttcttgtcaaccagatgagattagaggacctaaaaagaagcctaatttacgccctgacaaaggagttgaaggaagctctaaagaggttgttatcaaacattgttctgttttgcgcgggattatgaaactatcaaagctaatttctttctgttttttgtgggtactgcagtttaagaaacgagtaaaatcaattgctgttgatggttcggatattttaactgctgctgtggaagcggcgaagaaagcctcggctagattagatgcgaaagaagtggcagcgaaagataaagctaagaaagaggaagagagaatcgcagagttgaagaaagtaagaggagaaaaatggttaccttctattgaaagggcaatgaaaaaggaaatgaaggtacgttatacatatggtttctcatatttgtgtttcattcttgtgttagtagtagtaacatatcaacttaacaaatctcgctatgtatttgcagcgtatcaaacataccgcatggaagtctgcaatgtcgtgagctttcttcttttgaacttattatcaattttggagtctcattaattgaagaagaaacacagaatcattcactcttggctacaaaacttttactgaaagaagattatgaaattattatgtagagtagagagagattatttgttcttaatgtagtgagagtgaagttcttcagagatgttgtcatcattgtcgtctttgatccagacgaagtcttctaatccatcataaatctcctctactgcatatgcatttttcttgggtacttgtttggatgatgtagagaaagcattctttattcccataatcagtctttttccgatacttttctgcggttgtgcttgtggtggagatgctcttcttcgccggtaagttgtgctcaggtttgaaacagaacctctatcgcctctctgcgtcttgtttacgttactcggttggtgaacgcaatggaaactcgcggatcgagcagaatccatcacgcttcttgacctcgactccacgatattccggtccgatttctgcttctctgattctttcgataggaatctcttcattgtgtcgagctctttctctaggctttcaatcctcgagcttgtggaattcatcgcagc

SEQ ID NO: 28367 - DNA, 865 bp, Arabidopsis thaliana columbia
tatcttttatgtaacctaatatatatatcttaaacaacaggcttggattattgtctctcgaaaacctaaaatcgctctttctcttttcttgtcatcttctccatggctgagtctagcaagttatccgcaaccacagttgaagcagctcctgctatgattaaggccaaagacgtgatttctccttccgagaaggaagaatctgatcagacggagatcacgaaagtatccgtcttgaaaaaccttgatgagaaggagatgatcaaagaattcgctgatcgtcttcagcgtctcgaagcaaaggtggatttgttggtaacaaaggcggatttgttggcaataaaggcggatatacaggagcttctcatctcagccaagggtgagaaagttcctgccatgaagacttctgctaaggcttcttctgagagcgatgactcatacatggacacttcttcggaggatgaatcgtcttctgctgaggaacctgtaaacaaacctgctgcaagtgccgccaagccagctactaaagattctttattctctgctggtttcaagccagctgctaaagattctttattctctgctggtttcaagccagattctttattctctgctggtttcgagccagctgctaaagattctttattctctgctggtttcaagccaggttctatattctctgctggtttcgagccagctgctaaagattctttattctctgctggttcaagccagattctttattctctgttggtgtcaagccagctgctaaagattctttattttctgttggtgtcaatggtcgatcgttctctgttacgggatttgacgcatccgttcctgtggatgatataaagagcgcattgag

SEQ ID NO: 28368 - DNA, 847 bp, Arabidopsis thaliana columbia
gttaaatttatctcatatatatattacttagctgcaaattgactatttgaactcaatttaagatgaccatcattcgctctataattaatagttttgtttcatactgttcttctatatgaacttactcatggttctacctgaagggaaaaatttcaaaaaactatatcaataagaaagaaaaaatcataaactatattccgtgtatttcataagagacgccaacagaaacagaaacaagaaaactactcaatcatggctaaaaaaacatcaacgtaaaagaaacgaattgtagaaatatatatggaaaaaagtatgaagaaagtaaacaagcaggtttagagattacttctcgataacagatacacagatgtaagatcttatcccttgaaagtaaaagcaaagtgaaaaagaaatctaaagcttggaggcgagttgctttgtttggagacgtccctaaggaggctctttggttgctgctttctatctcttctgtttgctggattcgttctcccttagaaagttcgtttaaaacgtgtatatattggcttcgggcgtcggtattaggtttaggcctttagggtacttaaaagtcaaaacaaaacacttcgttttacttcaatgagggaatattggagcttggcagtggcaccggccgcgacgtggaggtgcggcgatgaggtttttggccatagacggatgcttgcaggacacggcgatcaaggctttgtccgttgttggttttctttctctgatgcggctggacatggctccattcaatcgggtataaaaacgtttggattgtcggtttggatacttcaaggcggatcctgactctactagcttttca

SEQ ID NO: 28369 - DNA, 448 bp, Arabidopsis thaliana columbia
atacttgaagaaataaacatcttctagatctatttgaccataatctttcactgatctgcagaactcctcccagctaatgtcattaagagaatttttccttggttttcttttatattcgctacaactgactttcttcctgctatcttcatgatccacagtttgaggagacactccattgtcaaaaacacagattaaggccgaggaaaaagtgaagggcttgaggattcctgtccgcaaactaccattgctatttgaaaaagataccaatgctgagaaaccttccctatagagataacttaataagatctgccaaatgggtgatgatcttttggctactctctcacccgtctcctttcctaatatctgaaaaaccaggtcagcccaaaacgcactctcctcctcctgatcttgatcagagtcctgggagacttgatgaacaacaaaagta

SEQ ID NO: 28370 - DNA, 609 bp, Arabidopsis thaliana columbia
tttgtttttactgtttttgagccaaaatatcaattcagtattataaagctaagaaaaacgtacaatcggatgacaaaatatatatatatttctacttatttatgttgattagagctcaactgattaaatactttttttgtgatattttgtatttaaaactctttgtaagaatacatagacgaattataatttacgtttgaaatactatttattaaatccacgcatagcgtcggtcgtcacctagtatgatataaaggattaatttgatattttctcaaaacaccaagatcgagagcccaagagcaatatgaagatctccatgagaatcatcatcttctgtgtgacctttattgcagtttatgctacctccatgcagtgtcatgtctgggtttataggggcttaaggtgatttaaactcaggcacggcactgcctccatggctgctacgttttttaaatacattgaagttaaaaatataaaacaatccataaatgtatataaggtttctttgttgacaaaaaatgctatgtatttaaaaacgtttttaaacacagtttaaattcatgaacaatcgatgaataaatggtagtgagatatctacacatgtga

SEQ ID NO: 28371 - DNA, 876 bp, Arabidopsis thaliana columbia
taactatctttctttttttctcaaaaaccaatttcttccacaccaaagaacagtattacacggctcagatgaaggttttgactctagtagttgacatttttcaggtgttttggaatcattacacaatatgatgagttttaaataagcacttggtatctattcatttgacttattgccaacactgttgttcacattctatctcagtttacgaaatctaaagaatgaacattgactttgtccaggtcatgtatgaggatggtgttaccgagatcatcgacatgtgcagagaagtttggaaggttgtaactgcttgatattgtgactgttccaagtctgatttcattcccttacataggattacacttgaattgtcaagaaattttgtaaccaaccaaaccgtgtcggttggcaaataggtttagactttgttgttgtatgtatccaacttgaatcagtagttcagtagtacattacactgtatgtggaatctttggaccaaataaagaaaagtgtttttggattttaaaccggggttttggttatttaagagacaaaaaatctcatacccggtttgctctgtctataactcgagtttgttaagcacgtgattctccttggcaatgctgctatatcactagcctactgtccgttgtagcggatgatacccacgcgccggtgaccgacagtggatttgccgttaccggtggtaggtaatgtggggtcgtagctcacctacctaactaaattttctttttcttatgtttagttggaaaataagaaaaatataaaaactagttttttgtaaaggaaaaggataaaattactattatggaaaagataaattccaaaagtgaggaaatatgtatttagcacaat

SEQ ID NO: 28372 - DNA, 498 bp, Arabidopsis thaliana columbia
caaacttcgtctataaactcttaccctaatctcaaaattgtaaattttattggtttttattgtagataatgaaaatcgttcaacataagagtgtacgaggcttaagtgttgtggcatttgagcttgaagttgttggttacacaatttcacttgcttattgtttgcataaaggtcttcccttttcggctttcggcgaaatggcttttcttttgatccaaggtatacgaattacaatcaagaaccctaatcttgaaccctaataattgacactaatatgatttctcttattacctttgcagctttaatcttggtggcttgtatctattattattcacaaccagtacctgtcacaacttggattagaccacttctgtatcctttttggttataggaatttctcaactttgatttgagactctctgttttagttttttcttaatgttacgccgatatagatattgcgctgtgccgaacatgtgcttgctggacagattaatc

SEQ ID NO: 28373 - DNA, 500 bp, Arabidopsis thaliana
taaatgtataataactaaagctagatttatccacttttaaaatcctattactatttgatccaagaaaaagaaaaaaatcctattactgttactaaaaaaacaaataaaattatattcactaaataatgggaaccgactctcattactctataaataccgaaactctaaactctgaagagctcacaaaagccataaaaaaaaaagagagagaaaaaaaacgaagaagaagacacgatgatggttctttattgtggacgtaagttactcgtcgtcctcatggttactgcgttcgtgttctccgggagtgctgaagcatggagctggagttggggttctggccagtccggttcgaacgggggttggggatggagatccggcaactctggcggttcttctggctcgggttcaggtggttcagactccaactcgggtggttcaagctggggttggggatggagctccgacggaacagatacaaactggggttggggaagcagctc

SEQ ID NO: 28374 - DNA, 799 bp, Arabidopsis thaliana columbia
tcatagttaatacaggtttcactatcagacttgcaagtgttaccaaagaaccaaaaatacatgtagccagtccaaactatgattcaaaaaagagtcaaagcttcacagtatgatgaaaaacatatgaagtacggatcaattacctgcgatctctctctgctatagtatgctctaacagcatgttgtaggccaggtcagtcgtggcagaggctgatagataatcctgtgatcatcaagcgattgtgtgagttcatgcaatgccctaaagacggagatcaaatatgtcccgtcaactaccaaggtcctaatacaatagataatgaaaacgggcttctccatcacatatctctctatccacatgaggcttcaaatgcaatggctactagaacaaaaggagtaatgtgtgggatattagcacaaaggtcttcacaaaactaaaacatggaaactaatagtactgatagaatagaaaattttcagctctaaaaatcaatcacgacgccaacactactcaaagaaagcgcaaatgtagacactgctctcttcatataccaatggaaatcaaaagccctagatactcaattcctctctttacacaatcatagaagatgatcaatttacctctaattaaacgcaaaaatggaaacacatggacgagagataatcccatttcacaataaggaaaataaagcaagcatagcgtaagtgttacacacccggagattcctgagagcttcagagggagccatggaagggatcgcgccatggtgcgaattaacgggaggaggagaggatgaga

SEQ ID NO: 28375 - DNA, 428 bp, Arabidopsis thaliana columbia
aatagtaagaggcaaacctttgacagacatgtaaccatcctgagaaatattgccacacgaaaatcttaagtttctgtgtagctttgagattccaaacatgcgtctgatatgccgaaaaggagtggcaagtaggacgtgagagatctcagacatgttggatatgctcaaggataagatagggatgctagtatgcaacaaacttttggataaaaaaaaaacttggatgaccactgagcatcatcgagagccgatgagtcgatgacggcctgcaaatccaaggtaacttggatgctcagactgagaagcattctgtccaaaacgaagtacagaatgagcgggaaaggacatctacagacgcatcgagatgttgtacaacgtcacgtgtataaagtttagtttataagacttgtgcagttggaatgatcaaa

SEQ ID NO: 28376 - DNA, 397 bp, Arabidopsis thaliana columbia
gaaacatatatcagagaaacaatgcagcataagtaaaggctttgacaacaaaaaaaaggtaagagacctaggccaatcttttagaggattcacgcctctgcttattgtattgagtcgagacttggataatgggcctaaatttgaccatagtcccaacaaatagaaccctaaattctcctcggctgggctgggaatggtgatggtgtggcggctacgtagagacgagcatatgatcggagttgagacactctttgtcagaggggaaagaagtggagtacacatgctacacatagtcttcatggtgcaaaacaggttggtggtggacaaatctaacctttgatttgattcagatctaaaaatttggggaggtattggggataatagcttcaccttaggg

SEQ ID NO: 28377 - DNA, 1073 bp, Arabidopsis thaliana columbia
ctctttcttcttcttcttcttcttcgttttcagcttctgtgggatgttgtaaggttctttgtctctgtcacacatactgcttcttctgtcggatgttgtaagttctttggctctgtcacagatactggttcttctgcagttacagcctcgtatttgtctggactgctctccggcatattttccactggacctatactaatatctgacttctctgtttctatgcaccgaacttccctgcagttatcctcagaatttccgtcagtgtgttcagccatttcataaaaccgttcctcctgaacatgaggttcttctatagcttcctctttgtgaacatgagattggtctacagtatctgtcacgtgaatatcatcaagtggaaccttaaggaaaggagttacaaacgcaagctgttgcggactacttgatgcagaatctatcctgaaatctgatagctgaaagacattctcttcataactatattcagttgatcgtggagatatactggaacggtgagctgatatagggctcagtggtgttgtattctcagagtcccatgtcctgcgcacccgcagcttggggtattgatgttccatcagaacctggacaaaagcgaatcaataagcagtaaaaggatatatatatccacgctcagtaaaattaacaagtgaatataacatacatttaacccttctgtttctgttgatagcgtctctttttcttggtttttttcttcttcaaccattcgtcgaagatccttaatctcggaacgagcttgctctagttgttgtgctagttggaatacctctttcttaagctgtaggaaaaaggatagatcataactcaaacctccaaactatagatcacttggattgggagcaataaaaaacgataaacgcaaggaaaaggtaagtgtagctgcaataccaaggaagatgattgctataatagtgaattcatggtactacctattttctaagatttcaaaagggtgattggagtacatcagctaccttttcaactcaaggtctttctccgcagtaatgcagttgtgtcagaacaattgaagctgacta

SEQ ID NO: 28378 - DNA, 433 bp, Arabidopsis thaliana columbia
atgaggtataaagacatttgggtcctagacaagctcaagggaccaagaggggccggagtttttgtgaattatgcaatgtatcatgctcaaaacatgatttaaccgctcacctctctggtaggaggcacagagctatcgtaagcgatacatttcattatactaaatgtgtgaatgaatattgtcctcactttaagcctaatcttgagttcactctacgggcattagatgtgaggcacatatatatatatgttttatgttgatatagtcttgacaattgttgttgtacatatactcaacttgtgtaggttgagctagtagaccgtggacgccctcatgtcagtaattcaaccgaaccaaagtatgcatggtgccgagtttgacagtttgcgtttccgcagccaagcaagttaatgaacacacatcattagggaaa

SEQ ID NO: 28379 - DNA, 578 bp, Arabidopsis thaliana columbia
ccaagtatgctttcttctctcacgatggttctagcacaatgtattggtcctttgtacttgaaaagctcaggactcaatcctttctgctgctgaagtctaattttcaccacctggagataaaacagagaactcaacagtgttttacttgagtaaatgtaagcaaaatctgtgtcagactcaaaatgcttatgattatgatgaacacgattctccgaatcaagagttgccatgaacaatagggaccaaagagattcgttggccaaaagcatcaaaacagatctcaacaaatcattttttatctctttgactaaaatatactaaataattgatgaacagagatgattttctggtgcaagaataatctaacaatttcaattacaccaaatctttgactcaactaacactctgatgattaaactatagttttaaatcgattcataatctaataaaatattagagaagccatgtgatttcattgtctcgaaaaggcaacaagacttacctcaaagggtgtaacaatggcgagagttcaagacaccggcaccgaatccggaaagaaaacggcacgattgctgacc

SEQ ID NO: 28380 - DNA, 369 bp, Arabidopsis thaliana columbia
catggtttgtgagttgacttagaaacccatttaggatgtagaattctttctataattcaaacgtttaaacattaattagattttaatttacccaaaaaagcattagtattttgaaatttggtcaaaataacaaagcttacttccgcatttactattttatcatttgtatttatagactgaaaatacttcaaaatttcttagaatctaatataaatcaaatcctactttaaattttatattagattagcaccggatttaacctagtatttataacccaagagaaattgagcgaaattgtaaccatcttaggatgtggtttgatagggaagctgtatattgacagatgaggcaatgttatctcattagcgt

SEQ ID NO: 28381 - DNA, 756 bp, Arabidopsis thaliana columbia
ctggacattatctaaagatcgtcatgttgtgtctgactccttctcttctgtaactgaagaagcaaaaacaaagtgatttttctcagaatagttaagactatgatttacttccgaaatttagttatcatgcttagtactcagcatatatcgttgtttgtcccgtattttgcagggcccttgtcagaagtatgtgtgagattctatttatgtgtggagacaacaaccgcgctgtaatagcaagtttcactaattttgaggattccagtagtaatcaaaaagatgaggttagttgaacttgagtagttcttcatatctggtgcaagcattggttttgctgcagtaatatatatgtggtgtccttatcagattccttctaatatattgttgcaggcaatggctggtgggctccccattgaatctgcttcagatttgcagaagatcttaaggttcgagacattcacaactcaagccagtgcccaaaataagctagaaggcacaataactgcttttcaaagtcgcatgggtgctttgctgttcctaatttctgctttactctcccgaggactggtatattgacgcaaccttgatccttattactcttttgtttgttaacatgtgtgcaaggaggcaaacctgaatgatagtaggggattgaacgaatttgaatcctttgatttagtcctgtggttgtgtgggacctttgattagaaaaatgcttagatgtttaggtcgttgactagtttggggccttgagag

SEQ ID NO: 28382 - DNA, 521 bp, Arabidopsis thaliana columbia
agtcttatttctttgatttttttggatactatgacttaaacagtattagtataagcaaaacttacatggcgagcatatatgaatatcttgaagcatccaccgatgcaagacttaagttttcatccttgtgaagaagtgcaacaaccttaataaaggacttagccacaaaattacctagcatacaccccggttcagaaaatatgataagaaagttttgctctcatcgtcaagaatatatcaaacaaccatttcacttgttccaattatgtatattattctttatagtctataccataactatttcattaacgctaacaccgcaatttcttattaattaaaaaccttgaaaaaaatagagaaaactattcatatataaaattataagataaaaatttacaattgaaagatattatatatgtatataaaattatgaaaatcaatatggcgaaaaattcttaaatcggaaacagaaaattatgttaaaccataagacataatttattaaattttgtattttatag

SEQ ID NO: 28383 - DNA, 330 bp, Arabidopsis thaliana columbia
ttttgatgatactattttttcttttttgaatttcacaccggattcaatcggtaaagtattatagaagttcttactgaaacaacattaatttttttgtaaaatataaatctaagaagaaaaaattactagggaaattaatagcaaactgtaacggttgactggttttgctaatcgtgcacggtttagcattgagattaagataagctctttctaaaatattcgaaacatatcctttaaaaaataaaaaaaaaatcaggctgaaccagcatgagtaatagattatagcgaaacaaagaccaagaagtcgttcaaaatactctttaaaatatt

SEQ ID NO: 28384 - DNA, 581 bp, Arabidopsis thaliana columbia
tagtaacggcgacttcttcatcgctcccatggactgactgatcctccttaagctgttaacagagaagatacagaatcatcaaacaaccttccacatacaaatcacatcagagaaaatagttgtagagtacctctttagaagttccttcagacatcctaggcgagctgcagcaagaagagtaataccgactgctggtttcagccatgtcagctttacagtcatctacactcccagcgcggctagtggctccatcactaggccaagcactgatcccaaatagaccaaactgaagattcaccggttcagctttctgtaggtatccatagaccgggtgctccattccattttcttcaatcatctcattacaaaagactggctttccactctcatcgaccttaccagtaacgggccaagttcttgcgaaagtgccatcagtattgagaagagccataagatgcctagaagaaccttttctttggatcagctgaaacattcctttggagctcaatgaattagctgtacactggtttctatactcatcgtcaatcactgagacagtatttgtagtagcatcatagaga

SEQ ID NO: 28385 - DNA, 450 bp, Arabidopsis thaliana columbia
taccgcacgttgtgtattctttctttttggttattaattatagtttgaccatctgtctcttctatatattatcatctacttgaggcataaaatacaaagaaatgtttgtcatgataattagagcttattgtgattaaacaatgaaatgtgaatgattgggattttgacaagtcttcaatctaacagattgtcacgaacaggttgtggtcacattaagttaagagtaatgcttccttagatcagtcttacttactacaatggcgactaatagtcatataggctgctcaacaaccttagcacgttcttgctgctgcaaagcctcaaattcccctcctcttttatcctgtatctgcttgattgattcttagaaaactctgtgttttatttttgaatatgtgtatcagtaggtatcaaggtaatacagaatgtcaagtttgtatgttttttttt

SEQ ID NO: 28386 - DNA, 422 bp, Arabidopsis thaliana columbia
tcatccgtctaatgctactgctgctgctacttccaccagttgattctaaaactcgggaagtttgaagagccatctcggcatggagttggagacatgacaaagccatctaatacaacataacacagcacaacacataagctaagttgtaactttctatcacgttgtaagctaatcaaaaacctcagactctttatttcatttagctataatcaaaatctaataagagatggatcccggctggcgcatgggagaatgtatgacttaccgtgtaacagtctcggtcgatgtctgagtcagctatttgaagagcccacgttcgtgatcattcaagagctctggaaagatcaagatttccttcagccaaggttgacactatgtaagacgggtgaagagaaccaaaacagaagaggctgcaaaaagga

SEQ ID NO: 28387 - DNA, 478 bp, Arabidopsis thaliana columbia
tctgtaggaatcaacgtcttaactacccacatattctcataatccactggtagaagtttgcttggtacattgatgatgttgaacgtttcaagcctaacatcaaaactcacaattatagaattactatccggggaatgagtgtccttccaggcagctccgtaggtagagggtaccgttcatacacatcccctgggtatagccaatatgaggaaaggcgatacacgaagtctctctccaagcttcttctcctcccaatacaataaccttgtgctctaatctccaaggaagagtatcaacggcatgtactgggggcgtggaaaaacttttggactttttttgaatttgaattcgggaaaaatatgcagttgtctcgtgctgggattacagatcgcaacatttgaaaaacctccaacgcagatcaaaccccgatccgtattatacaccattttacctttaattttgagtaggctcaaatctc

SEQ ID NO: 28388 - DNA, 475 bp, Arabidopsis thaliana columbia
atctgtgaatgaaagatcggatttttaagtattgtgagagattaagaatccaaaattggaaaaaaaaacgaagaagtctatgatgatgacctgtgcgtaagactagtgttagtgggattaagcttttgggatttgcgttctagattcctttttttcttatcggttatgtcaaatccttcagctcttcgcttattgaacacgaatgaattagaagaagacttggagccattagttgcttcgttgttctccattgaagacgatgatgaagaagaagagaagagggttgagagagagaaggatcgtggagaaaagggtctgagagaaagagggaaaggagaagactttgaagagaggagacgaagaaggcgtaggtttttgtgtaaatagggcattgagtttatcatctctctccctctggagaaatagacgagaaaaaactcaaaactctttcctctttcgccagaagggttttagg

SEQ ID NO: 28389 - DNA, 639 bp, Arabidopsis thaliana columbia
agtcgactcttcccgatccccctgcttcgggcatgctgtggaacatagcgtgattctgagcaattgatgacatgtttagggtaggagcagtgttagccccattgaacgtcgcaaaagtcatagcataacccggtgactggaaggattctacaccagcctttgaaacctgctgctgtgatttcttttcaccatgactgctcgaagatccaaccaccccaccaccaggggcaggggaactcatcaaacccaagttagttggttgcatttgcataccatagttctggccataggcaacattggaacgagaaccccggctatcagcagttgatgggctatcttcccctacagtctcactatgttgagtagcattttctctgggttgctgcctctgctgaaaattcaaaggctgcgattgcactttatgagttggaaatccttgagagtcccatgattaatcggtggcctcaactgttggttctgcagatgcttttgagctgctgaggaccagtggaagcactcccattctggttgttaggagcatggctctggagcatttgaccagttagctgctgctgatgctgcttttgtggctgatgatgtggaggctggatcatttgggaggaatagaatgaaccatta

SEQ ID NO: 28390 - DNA, 496 bp, Arabidopsis thaliana columbia
caacaataaatctaatcaaattttaaaacttgtgattatgttaatagcgctataattaaaaactctgatccgtttaaaatgaaaatgacttttcagatttcctttggttgctccgctacttctcactgtcgctctctcagcttcctctctcacaatcataaaataaaaaacacaaagtagcttctccaagacgcggttcccaatatctgcgtttcacgtttgcgtattccggcaatagctctccaagccactactactacgttctgcttctccggtccaactttccgatcaactcctcactcactcacttcaaaacgtcctatctccatcaaagctactacttcttctccttcaagactctccaattcacgatctaatctcaaaggttaaatctcaaataatttctccatcacattttggtgttctttaccataaattctcataaaatgttgaaattgcagaatatgcttggtttatgcattaatcttatagaatt

SEQ ID NO: 28391 - DNA, 417 bp, Arabidopsis thaliana columbia
tacatgtattaattctggtaagattaaagctattttaacgaaaatgtcatacttatgtgtcgttctctcagaacttttcaatctatttaattaaacatctaaattttattaggatatttatagattttaccattagtcttacttctgatttttttctccaattaatttatacttttgaatttattcaatgatattaaaacaaaaatagattaatgtatgcaattaaaatatacaaatctatacagaaaaaaatatttaacgtttctttgtatctattaatataacaaaatatatatatcatagaacataataaacataaacattagtaaaaccatccattcgggttctatatttgttcaaagaaaatggcttagctaattcatacgtctaactaaattttttttccttttacaattt

SEQ ID NO: 28392 - DNA, 589 bp, Arabidopsis thaliana columbia
tccaagagcattctcagtaatatatggtcgagtattgcagggagagctttgaagagccatatagtgcattgtcaagtgcttcaagcgtgacaaaaatgttctgaaactcaacaatggagccaatgttcagaagaaatcagccaccttgagcttccaagaaggatacatatctgactcaagaactgtttcagtctttcagagtcatgcaaaggagaactcacgtctggcctttaacagatcacaggcgagacgaagagagagcaagacagtgaggtgggttacatttgttcaccatttcttctggtgttaaaatctgtgttagtatttataggaatcgctttaatggttttggcaatttgttatagcattttgttgacattttcttctgtgatttgtaaatcttaaatctttcttctctttgggcagtataacataatctgattcgaataattaagatagtatcttttccaattcgaacctatatctacgaaaccaagcaaaatacttctgaaatacaaacctataaagggtggagggaatgttgaatcttgagatcgtttcaggtggattcaagagtcttgaagattta

SEQ ID NO: 28393 - DNA, 1303 bp, Arabidopsis thaliana columbia
  unsure (1)..(1303): unsure at all n locations
cccaaatcgagccagtaccagaacagagcttatcagattgtggataaacaccacaagagcaaagagaggatgatgatgattcaacgcaaggacctggtaaaacttctgggaaagggaggaagattctggagaaatttgtaggattccaacacatgattgagagattacttgaaatcaacccggcaaattagacccggacccgaggaaatcgattcgaaagagatcgaatccgtgacattgttgaatctctctgctcctccgccccaacaaaccacagaattattcgagattcgcatcgcgcaggtgaaatttgatccgagagagagagatgatgagtaaaggttaggttgatctggagcaataacattgagctgaccagaatcgttgtttccgatgcaaatcaaattcccagtagtgtttaatccacaagcgtgtgatttacctgcggagatggtcaccatcggcgtgtttccgaatccggtttggatctgattcgatttaaccggatcggttccccagcaaaggattcggttatttcgaatcgaaacgccgcaggagaaaccaacgccggatgaaattgatcggaatctctcgttcggaggttttgattgatcggaaacggaacctctccagcattttaaggaatttgtaccgttaacggttgcgcagatttgtttatccccgacggagagagtctcgagtaaaacgttgtcgttttggtagattcgtttccggtttggagagtagcttccgatgttatcccaacagagaaggctgtaaccaccggagcgtataccgcagaggaaattatctccggcggctattgaggagaatgagacgccggggtttagagtgacgttgatattaagacgcgtgtcgtaacagaggatacgttgtgtgggttgaccggagatcaatgcgcagacggtgtcggagccgtatacgactgcgtaagttgagcctgaacctaaggaggtgacgggagacaagaggaagaagatgataacggcgatggtgacggtgacggaaaacgtcacggttgagttgataaacctcttcatctacagaggttgaagttgactggcgtcttcgtcgtcgattctaagtcggattggttcattttcagaactcaataacaagactcttgtgttagaagtaacgagagaagaagaagaaagaagaagaagacgttcgtgagatttattagagacaagacagtaattagaaattagtcagaatttgcttaagaaatgcgtttttaatatgttagagtcacgtttttttgtctttgatnttgatttat

SEQ ID NO: 28394 - DNA, 665 bp, Arabidopsis thaliana columbia
actctatgccttccagctttcgtgtctattagtttagaaataaggtcgactctttgctcctttctccggaggctaaggtgaagctcaacgacgacggtgtgacgatgcggaggcagtaggtagaggagagagctctcggctcgatccttatccaggagactggtggggttcggagctgctccgagcagctgtttcgatccctgtatcccccaggagaaccaagccgacggatgaacagaggcagagtcagagtcttccaggcgtggggatggagctgtggtcgccggtggccgagataatccggagatctagtgaaccgtctcaatgtctggtccagtccggcgatggagcgaggcaacaaggcatgtgcggcgagatcgttccggcaatgcaccgtttaggtgaggtcttactaatccgggctccaatgtgttatccttaatcgattagtagcttacggttgattggttagctcgggaaaagctctagccttgctggtttgccttgtatcattggtcgggtcagtcggatatatggtccgcttttggtttaggaccggaacaacgaaagccggggatattgagtctttctgatgatgcgtctccgggtggtaatgctattgggacatggattacattctgatcaatagggactaatagtatgga

SEQ ID NO: 28395 - DNA, 653 bp, Arabidopsis thaliana columbia
caatcacttttggatatgatttccttgtagactctcttaagacagacatactacatgtatatgagtttttgtaactttaggatatttactacctttgttcccgtgacttttggtttagcctttagctatgcttgtgttgtgtgtgctaaagatttttcaacaattacaattttacctgtaattttcagaatattagtcttgtacaccctatactctttggttttacgtacgttcctcttattaacattatagcatatgcatatgcatagaatattagttgaaaagtttgaaacgtcgttgcgttgtaatgtggagtgtacatagtgatcaatggtttaattgggataatttcctttagacaaacgaatcaaaacacttcagagataatttcttttggtgaattattgcgttcgtagtttttttactctgaagtttcttttggagattacatttaaatcacgtgtataactccaacaccgcctcctttgtggaatgcacgacgataatttgtcactattatctataatcaaacatgagtcacaggagtatatgacacaatagtttatttattaagtggtttgcaaaaatattttgtctcttcaaatatatgtaggctcactaaaataatatcttatttgtgggcttagatttga

SEQ ID NO: 28396 - DNA, 672 bp, Arabidopsis thaliana columbia
gctattcacatgagttcaaagcccaagttggttctacgcacatttatgacaaaacgttccaaattccaaatcattaatctttaaatttgactgcccattactactttccgtctcactagaagagaaagaatttcaacagtccgatatcatttatgcatggttcaactataaattgatcatcatccatgcaaacatttcaccttcaccaaaaatagaacaagctattttgtcataagttaccgtttaaactgatttcatcataagtatcgtgaagatgtgggggtgcttcctaacgatcatgtactgtttcgtaataatagttcaggctggcattgcatcgcttctgctttcggatatatttagttaggaggtaactaatgtttagcctcttaattcctatttgaatttatgaataatttgtaactgatcaggcttataagtcagatctctaaatggattattaaataaatcttgcttcctttttccttttatctatttactcattttcatatttttctctttttgattgacgactgatgacattccgaactatgtcaattttattgttttacgctcttccatactttaaaggttaaaactatacatctggatagtctcaatgcgttatatttgtctgaaatatcaaaatgtatggaaccagtttaaacaacg

SEQ ID NO: 28397 - DNA, 923 bp, Arabidopsis thaliana columbia
gtaacgaacgttttgttacatagtagcttataaaaaatagatacacttttaatcataaaacttatagctccgcattgtccactagcagttgtctaagcttgtcaaactccttcaagtttacactggatatagggtggtacactagtctttttttcttgcttgcaaacagagcttttaacttgggaccacctgtatactcccctcccttgacaaaccttgaagcacgaggcacgctcttagagatatttaccaactcttcacgagtctgaggagacaaagccaaattttcctgtccaaaatcatattaatctaagagacaatggtacctattaatattcattgaataatgtagatgtggacttacctctccaaatgtttacatatcagcaatgattggctccctacatgttttttcatgtctactctctaaagtcctacatgtttcttcatgtccactctctaaaccggaggcacaatggcaagtgcattgtgttcagcaaacggtgaatcataactagattcacattcgttatcagattccattccctgcaagtaaaaaacataatgaaatcacacattcttgtctgtacaccaattaatataaccagtcaagtagtacacaaaacaatataattgtacaccaaacaaataacacagttttttacctgggaactattgccttttgttgtctcttggtgacatgcaagatctacattatcaatgatgtcttccacacctttgtaagcctcgtcccatctgtttctctcatagagagcaaacccctctacttcctcttcagtacttttcctcttcttcttgcctctcgacgtggaaccagtctctaaggtagtgacctcaacatcagaattgtcgccttcctgattctactccattggggtatcgtcttttacatcatcctttgg

SEQ ID NO: 28398 - DNA, 967 bp, Arabidopsis thaliana columbia
tcaaacgtattgtacatctaacatgaaaaaggtaaattaaaatctgactcctaaaacctaccaggtaatatagaagaaagaaagatgtgtagattttatctgttaaaaatggaccaaatgattctgctatttcgagtgtgaggaggttgtagaaaaccaatcatattcgacaaaaaatcaattaagaagaaaccaaccaccaaaccccattcattaatttcctttgcttggaagacagctaaattaacaccaaagaaggcttgttcaaactcacagttacatttttacacggaaccatccatatacaaaaagacacacttgccaaaagctatacttaaattatcaaagttttagtcatgcactttaaaccaaagtgaatgcgacagttactataataatcttctgatcaatttacgtaactcttgtaactgttcattgctcttatttaacaaaaaggtaaacgtattatatgattcggagttgcattaccgacacaaactgattaaatattataataataagacgatggaacacaaaataaactaatatatgaaaaacattttataaaatttcaacgttttattttccaaattttgcagcggaattagcagaggaaacatctgcggattccgaagcaggaagtggattgtgatctctgaattgggtagtcagcagaagagtcgaaggatgaaaatcttcgcatgacattcctttctgtttgaaacttgaacagatcgtactcattttcgtcgatcaacactctctccgacagagatggtggtgatgaagccgacagtttcttagccttaccattgtgatcgcccgatagccagaagagccttgtcgggattagtgcgaggattttcttggtggactttttggaacggcggcggatttggcacaggagaaagagaaatgagacggcggaggagtgagaggtggcagagtaggtagctccagagagggt

SEQ ID NO: 28399 - DNA, 784 bp, Arabidopsis thaliana columbia
gatggtgattttacccagttcctaatgatacaagatgaatcagtttatacatgtcaaaattcttgtttttcaaatgtttcaacatgtatatgtgttgtatcatctattgtaaattaagtacttgatctttctcttatgactttcaggaatatagttacagttccaatgagaagttcataaaatggacagtgacaaacatgaacgttactaaccggtggaagttgggttcatgttatattttaaacaacttactttgtagcattcttcttttgggattctcattttgactcggacactctccactgaaactagttctatacccaataagttggtagaccatggttttttatgagttacatttagtttattctaaataatataattataagaatatgagttacgtgttgagctttgtggtattttaaatggacaaactcatgagttcttacaattaaaacaaggactttcaataattaaataataaaaaagctataaaacaaaatatagaaacaattgttaattaaaagaattagagtaaatttccttaagagacctatttgaagtgttaagagtttttataagagttgaagattttcatccaaattcatggatcatttattgaatattattgacaatatcaattttttggatgcgaaaaaacttatctttctttgagtatgtcacataaatgatcgagtgatttggatgtaagaaaattaattagaaacgttggttttacctttttttggccgagatgctttatttcaagaacagaaatagtatg

SEQ ID NO: 28400 - DNA, 999 bp, Arabidopsis thaliana columbia
cgccagcacagcttgcaaaagcctacatgggtagcagaccttcagaagttactccttctatgttagggttacgtggtcaagcgggtagggaagattctgttttcctgaacagaaccccttttccgcaaaagtcacctacaatgtcgctggtaacaaagccttctggacaaagacctttggaaaatggttttgttacccctagatctcggggaagatctgctgtttatagcatggccagaacaccatactctaggcctcagtccagtgtgaaggtttcaattttgagccgtaactatattattgtaaagtttccaacttgctcccaactgttcattgtgttctttttttacagattgggtctctttttcaagcatctccaagcaaatgggaagaaagcttaccttctggttctagacaagggtttcaatcggtgagacattttgaactatgcaccaaattggtttcagattcgtctgtgaaacaaagtattgacatgacttttacttaatttttagggtcttaaacgcaggagctcagtcttagataatgatataggatctgtgggccctgtaaggaggatccggcaaaaatctaacctttcatctcgaagcttggctctgcctgtttctgagagcccactttctgtccgtgccaatggtggagaaaaaactacgcatacatctaaagatagtgcagaggatattcctggttcaagttttaaccttgttcctaccaagtccagtgagatggcgtcaaaaatattgcagcaacttgataaactggtttcaacaagggagaaatcaccaagtaagttatcccatccatgctacggggtccgctctcaaaagcctccagaatgtagaggcccaaagtttttgggtaatctcccgagaagaaggcaaattcgccagattctagttacaaaagcaggaaatatctagagaaagtgtctccagagaggttttagctcagagtgagaagactggtgatgctgttgat

SEQ ID NO: 28401 - DNA, 535 bp, Arabidopsis thaliana columbia
tgttagagtaaattaggatggcttagagtgactcttactcattggtatacccataaaggtcttgtgtctttgaacaagagttgtgaattacatagttttgtggtattcttttgttttgtttgtgattagaaacataatcaaattaaaaattgttatcataccatgaaagctgaattgttatatatatttacccaaattatccaatggactgatccttagtttgggttgtgtgacacaacttgcgtgtcattgacttaattgtggaggttctcataggcagataattagatcaagtataagattaatattcaacaaattgcacaaacaatggtgtacatatatttaaaagtgttggaagagattattattacaccacaacaaaaaagacatgattcaccagtttggaagacaggagctgaagtggtttataaatagattttgtacgaagtttctctacacaaacctttattatacaaatggaaaaacaaaagaaaatcccaacttcacaattctctgagttttgtttcacgcacca

SEQ ID NO: 28402 - DNA, 913 bp, Arabidopsis thaliana
cgttaccgggcgataggatcccccgatgaatgcgatttcgtttggatttgtggcgactgcaatattgatcttaatgttcatcataatggcaattcttgaacatctcttcaggtccgatcattcttcttcttacgatgttgatgactcttctcagtttcagaaacttgctgaaaaagcttctatggtaaacaccactattattataattttttttattctttgtgccttattctttcccaattctcattttgttatgatagcttagtagcctacaatttatatgatattacttgaatttacttacgcctttttctgaaaaaaagagcatactaaatttgggacttttcttttacaaaactacaaccctttgaagtttcaccaaaaggtaaattagcaaaaatgaagtttataaatgtctacagataacccagtctgttaaaaaaaacagctttagtaaaacttcaaaatctattactaacaaaaaataaaccttgaaagtttcttatttattcactaaaactaatttcccaaacatattgttaggtcttattttaatacttttcgaaacatttgagtttttgttgttaactttgcttttttgacgtaaaccaccactttataaatcatttgacataacctaagcacgtgagatatggcaggttccggtgactacgtcagatgtgtcagtggtgatgccgggagacaaattaccgtcatacgtagctcttccggcaccatttccttgccggagagaaggcattcgctggccttcccacctctaataaagtattgtctctcttagcttagtcgttgtatcataattacttatcaattgttctgatactttgaacaattgcttgctggatcgaagttttaggttaaatatttatgatgattctttatttttagtaag

SEQ ID NO: 28403 - DNA, 634 bp, Arabidopsis thaliana columbia
aagaccttccagcagggccaggattttaaaacaaaatactgaagttttgttcacttaaatttcaatacttgtagatactagtgaaaacaaatcctttaagagaagttttcaaattatgaaaaaaattattggactatataacaacatataatttgatttgtaaggctcaaaagattcagtgactaacggtgacagacgcgttggtccacgtggcacatatggacaaaagacaaaacaatcttgctgatccaaaaagaatttacacacgatgtgaagaaataaaattcagatattttacgtaatcaaagtaaaatagatatgattatttgacggtcatggtgattcacagtttaattgacctattacgtggtgcacaaaaaataaaataaaaaattgacctattacgttagtaaaaatattttaatataatagtttatgtattggaattcaaatatggtaatatttaattaaaaaaagaattaggcaaggcaagtgtgtggaatgggcgaagaatccataaattgagagtggttcataaacagagttggttctctaagcttatacatatgtagttacttatatacatgattaattagaacatcaaacaaagatcaggataaccaatgttaaccgg

SEQ ID NO: 28404 - DNA, 1059 bp, Arabidopsis thaliana columbia
ggaaccatggtgcaagaatcccaagcaatcatgggcacttgatgaaaatctaaaatacaatcccggaccagcttccccgcggagtaagaggacgatcttctctaggagtttagaagcagcaaagagaacaccgaggccttgcaataggaatagtggagaaaacagtactgggatcgatatatccttagctctttcaggagtcccctgaaagtccaaaccattagctttttcagtattgtccaaagacaatatggtaagttagagagtcatgtggtgtatacctctaaatacatgcaaaggacaacttgaaataaaataacgggaatttttaacatatgaccaccaatatcttgcaaaccgcaccatctatcttggtgtctatcctcttctggagcaaccacaaggccgctgttccagtcaagatatctgatactggtagaagatgacccggtttctcgggcacgtgagcttctatggattactggattggaccattttgtgcaaacaagaaaagcaaagcactcggcaattctgcaagcagaacatttcatatatattactttcatattctttaccagcaaccataaaaatggcaagtacttctcaaagacttaaacaaagaaagaccaaaacaaaacatacccaaaatttatgaatagatcccaccatccaagagcaactacgtcgcctgtgtatttcaaataaaacaagaagggagaataagtacacaataaccacatcaacgaaattacctttggaagatatgatttcaatagtcaaagaggtaagacaactatttaagcagagcattcaagagacaaaaattaccagaaagctttaggagggtaaagaacgtagcagccaacgtgaacaccatggaaattgcaacccagaaatgctgcaggcaacaaggaaaaagcatctaaatggttatttttgagtactgaccagcttccccacccatcaacaaaagattagaaaatcccaagcctgtgtttgtggaactaaagtattagagacattggtcaaagttttctccttctcagtcatgagttgtgt

SEQ ID NO: 28405 - DNA, 587 bp, Arabidopsis thaliana
aatatttataatagatggcgggttaaatataatgttttatgatgaaatgagttatgatctttataagtatttgaatatttatatttttttattttctacaattctttttttgaaattcataattttatatattataataaactttttaaatactatagtttgaaacattttaaaagtaagttgatttaatatgtcgaaagaatatcaaaaaatttaagagtgaattaggtgaataaccatatttgcaaaagttattaaataactagcactataacatacataattcagtaactaacacatgtgggatatgtaattacaacctactccttatggcaacggaagtgactccggcgacggtggtggctccggcagcgtggttgctccggcgacggtggttgctccggtgacaatggaagctccggtgacaatggaaaccctgacaatggggtggtggctccggtgacgatggttgctccggcgacgttggtttctcggcgacggtggtggctcggcgacggtggtggctcggtgcggtggtttctcggcggacgatgattgcccggtgcaatggaaacccgacaatgggg

SEQ ID NO: 28406 - DNA, 702 bp, Arabidopsis thaliana columbia
attggtttagattggagatttggttaaaagactaattggctattttaacctaatgtgaatagctcagtttgattaaattgaagatatgaagttgtcgatgaatttcggtttagttagttcatttggattattcgtgtccgagttgatgtccagcttttacacagtatttaaatttcgtcataaagacccatatatttgttacaggcccaattatcagtttaggcccaactaaattttgttgttgtttcttttggtcaacgagactctcaaattacagaactaccttaactgtttactgaacagacatcagacctgacgtcacacgaaaaaaacagacaccagacctgacgtgtaaatgtcatccgacgggtctaaagataagtttaaaatcagctataaattggcaaaagagtcttaagaaacattgtaaattcaaaaaaatggatccgaatcctaaaccggcgatttctggcaaagataatggcgtgttcgagcatcgctcgtttgctagaatcgggtttcttggaaaccctagcgatgtttacttcggtcgtacgatttcatttaccattggtaatttctgggcgtgggctaagctcgaaccatctgatcatctcttgatcaaacctcatccattccatgatcttgtccagttcgattctctcgataatctcgtatgtgctctgttcccaaattatttgt

SEQ ID NO: 28407 - DNA, 464 bp, Arabidopsis thaliana columbia
ataagaattaataacctagatattatcataatcagcatcatcatgttaaaattaatataaatcaaattgataattacatctatctgaagaaaaatacttgtatacgttaccctaatcaacaaaacccaaactaatcattttttgtgagatttgaactgttaacttatacttttcctcaagatttaagacttttcctcaatcaaaagaaaccctaattcataagtatttgatgactaacctgtgttcctcttctgtccaaggatttggcgtatccttcttcctgcgtttggactgactcgattccgccagtggtacgtactcgggcatcgtgattaacatcgttggccatcttttcgtacatgtacttcatctcctccatttccataggtttctgcagatgctgggtgacattctctaaaggtttcggcagataaacatcgttgaccaacttttcgtagtagtac

SEQ ID NO: 28408 - DNA, 688 bp, Arabidopsis thaliana columbia
cactggatacacatacttcacaaacaacttatccaactcttctgggaggaatcctgcagaagccaacacaaacacacaaaggagatttcaataactgtttatcctctcaacacatctattgaattgaattggagatttcaataactgtatattcaaagactactaagaagaggcaatgagaagtatcctcttctgatcattcattatctctctagctaaatcacagatttaagcaatttgatccatatcactaacgactgttaacaaaccaaaccaagttttatgcaaatgcccagattcaatacctgaagcagcgagaataatgccttcgatgaggatgacgataccaagcccaagccaagtaagaagaaacgcgttttcgttttgtctctgctcctctgccttggccgctccttcttcgctcatgaacacaggtttctccacaggagcacgccgattcacctctctcttacctttccctttcttgtttcccgatgtagccgcactcaatttcttagccggcgaagaagaagacgccggtgaaccgaatcctacgccggaagagcttgaattctttgaacgagatggatcctctgttgtatcggattcgatttgggaattttgacatttgattgcgaatctagggtttctggtagtgaagaagagatgataggggctcgtggagaag

SEQ ID NO: 28409 - DNA, 508 bp, Arabidopsis thaliana columbia
cttgtaaggcgctcagagcagtcgcagcacaggcagggtttgtaaaatcaacaaagcaaagaacaataggatctccgttccgctgcattgccccataaatatgaacccattagcaggtttatcaaagtaattactttctataacaagcgattttcagtaatatccaaactttgaagcagggaaaatcttacatgtttggagtctttggtcacaagtctcacttctctgtatcctacaaaaggtcgaaatatatctagacatcggttaaggaaagtggagagaaatagtttccgtaaaagaaaaaaacttgtaatgtgtcataaaataggatacgagctacttccctcctagagcaattagaaggaagtccttcaacatataaagtgttggatgcatctgaaggtaggttacgcctaccaacaggttctgggggataaaaccaatggtgtgccatttggaccatggctaaagggagaactccacacgtgcaacataaaatcactatggt

SEQ ID NO: 28410 - DNA, 552 bp, Arabidopsis thaliana columbia
taacggccgccagtgtgctctaaagagcttgcttgaaggatacttcgttcaagctaacatatgggagcgtgacgttctggacccttctaatctatcattttctcatcgtggagcctcataattatcatcaccattagtcttctggatcccctccgcctctttgccatttctggtcagaagagctcttccgtcctccgcttcccagatatggcgtccaggggcctattggtcgtgagcatacgggaaagggtggacagcctgcactagtcccttctccagctagacttccatattgagactccacaagtaaaacccacgccccctcaagcctggcgccaatgacattgattgattttctgcggaatatcgactggctactggggctttttcttttcaccgtattcacgactctccagccgggttcgctagcaaaagagccggtagaacgtggatctgaagccgcgttgcggtcccatttggcctcgttaagttcttttgcgtgacgttggaacagacaggcccgtttgttttggcatcaactttggaaggtag

SEQ ID NO: 28411 - DNA, 1067 bp, Arabidopsis thaliana columbia
  unsure (1)..(1067): unsure at all n locations
tttactatttcatcacacccattctaaattttttttttggattcatcagagttactagttctaaattttgatattttgattataaaatatgcaatcggattagctaaatatatggaaaaaaaaatcacctaatagtttttgcatctgtagtatttgatttttcatataaaactacatatactaactcattttcatttttatactatagtagatttaatttgcatagaaatatttaaaattttagcattatctattttatataattttcatgtgaattatttattttctcacggatatgatttgaatttttagaatatttcaatgtttggacggacattcgaaatctaaaacttggatatcaaaatatccagatatccaaaaatctcgaatatggatcttaatagttgttgttcaaataccattttcaaatattgtagaattttatgatatctaatccatttatccctctaatttttatcactttgtatttatttttatttttttatttttcttcttcttcttgacatcgattcaacctactctttaggcttaaacacgttttagacatataaaagtaagaaatcaatcacgcattcttttcgtttgtctaattttatgttatcataaccagtaggtttacttttctaaaatcgatttagataaataaatacccaccgaatcggtcttccctatgactcgatactaattgtcttgacgtaccaaaactaattgtccaagaataaacaaaaagtggccatgtgtatctactagttgatctaaattgaccaaagttaaaaatgtgttagatattttagttaaagtacaaaggagccatatttggagaccacaagttgctagaaagtgatgggatcgtgtagggtcaatgatccctaaacaccaccgagataaaaccttttcttcttctttttcagactctccatcttaatccacgttggtcgttggcgacttattagcagccgttcacatcacatttgttcccttctcacaaatccaacctaaattctccaggtttttgtatatagtganaatatacaattagacaaacg

SEQ ID NO: 28412 - DNA, 1013 bp, Arabidopsis thaliana columbia
ctttgcaatttgcatactaggaaaactaataaaagaatacaatcggagaacaaaccttaaaatagacataaacgtaattgtccttaactttccaaggaatgtttcaaaagttaagtacatcatatactcaaaagaaaataaagcaacccacgaccaagcccatagaaagagagaaagtacctgataaatgtgacgaatctttcaaactcagaagtgtagactatagcagcttcagacaggagattcatttggtctttactcctgctcatcacacacataataaaatttcactacctctaaatgaaaaagttcatggagcacttcaacctcgctgattattattgacttgtggtaatttaaggcaatcttactttaacaacaataaaccaaaagatggaaaatattcttggactatcttacagtttgaaggtatcatatctttcccacagaagtgttaggaaaacccgaattgcgatcaccatttttgtgagactgtatagagggggtccataacgttctcgctgttcttccattggcctttacattagaacattaattctgtcagttaaagattcatatgcaacctgaaccttctggcaaacactcattgtgtaatttaaatgagaccatggtacatacccatcatcatcgtttatttgtcgaataaaatccaacaacacctacaaggtatgagcgaagaagaatcatgaggactattggcggataagaataagaaaattagccataaagacacggtggaagatgaagagctttgccagaaagagtagagacgggtaagcctacctgtggaacccctaccaagtacttgaccagggttttgtagacaccagtggcagagctagctgagccaactgcctcctcctaaagaaaggtcaatggatgcataagccagactctctgaagaaaatcacaagcaaagcagcaattaagaaatcagaaacaaccaggctctctcacctctccatttgctgcttccaaagaagagcatatgt

SEQ ID NO: 28413 - DNA, 669 bp, Arabidopsis thaliana columbia
ttctaaaaaaataaaattaagatataaaacatccatagtctccctttctttctcttaaacaagaacaaaaagaatgtgagctctattcaaaagaagttgacaaaaaaagaacaaaaagaatcatatatcaataaggctaaccttaaattcttagaagcgaaaacagaggataacattacgggaataagatctcagcagtaatttatcataaatatttcacactcatcgtaaatatcccaggtggaggtgtgttcgagacacgttggaagggatctcttctccaaaggagatgaatttatcctggtatgggtcccgcctttgggagatgtaggtgaattcgtcatttaatgtgatcaaatgacaaatttgtgcaaaatcagaacaaggacataggtaaaaggtatttaaaagaatgaattaagagtgagaatagactttgcaaaaaaataaaaaataaaaatttattggacaaacatatttttcaaatttacactatataaaagttgagattattaaaataagattaaaatgaatagaaataactgttcatatttgttaaaataactattaaaataagattacaatgaattgaaatagcttctagagtgaaagacgctcaaaagctttgagcttgagctttccttgaaggtagatcctttggaagtaaga

SEQ ID NO: 28414 - DNA, 645 bp, Arabidopsis thaliana columbia
tctttcattatcggagtatgtttaaaatttgaaaacaaatacagacacggaccgtggtctttaccttcagaaaaaaaaagagaaaaaaaaaacaatccactgtttattataggagttgtagaaaatcgggcaacgatattcgatatgagttattattagggccttattattatatggtattactggatattactaaataaaataatcatataaatttcacattttaatatacactcgttggacacgcggaatattatatgttctaaatgttaaaaaaatcaaaagaaatacaacgatcgacggatctagagtctagaccatgcaaataaatcatcctatttaaatataataactgtgcatatagtttagtcaaataaaaaggtaaagaaacaatatacaacctataacgtcaatatccatgtacgtagtaataattaggatatgacagaaaacacgatatcttgatatatacaaaatgaaaacttaaaaattgattaatatggcctggctgggtatattattataaaaacataaagagagatcaataattgattcgaagatcactatataaagaacgtcttcgatatgtaaaagaaccatcctaaacattttttcttgaataaaatcagaattacaaacaaaaat

SEQ ID NO: 28415 - DNA, 672 bp, Arabidopsis thaliana columbia
ataaaccacgggttaactccttacattataagtgactgtctcatctgtaccggaccataaaccaaattcaaccaaccataatccccctttcaattttgatctattcaacaatgactcatgcatactttatttcccttatctcatttccatattcgaaatgtaagctctaaaatggtactcttaactgaaactaaaatatatataaaaaaaaaaaaatctacatttcttgaagaaacatttttaaaattaactatagttgctaaattactattttagattgacatatatatatatgtagaccaactaattaacccactgaaatgcaaagagatggtctgaaaatcaaaacagacatctaaacgtggttacctacccaagagctcaccagcctatagtatcccattccctttatattgaatcactttagattatcttttctctttcatctttccaattccactctatattaaagaaatattattttaagaataaacaggatcgtattttcatcatatgccaatatgttatttggatttaagattgttttcgaatctataaatactaattaacacaacagacaatttccaaatatcgtagtgttcataacgaaacgagcacacaactcactagacactcaaacaaagatacagacattaagatgatgatgaagat

SEQ ID NO: 28416 - DNA, 690 bp, Arabidopsis thaliana columbia
gaaattatgtgccgatacatcttgtaagtctagcccctacctaatactttataatgtatgtagtgaattttcttctatttttattattaaagattggataaaataatcattcaagcatcatagtccatagtaatcttgctttgtttcgcaaccaagtaagacatctcaattgcgatatcatggcgaaatgttttcaaactttcacgtctatgttgtatcacatatccaatttatgccatagacttggtggagtgcatatctaaatcccacaatgtacgtctaggatatagaagagctcatgcagtcatgctaatacaagttggatatgtgtattgtgtatatatgaaagaattgtgattttagggaagagacacaaccctgcgtattgaagaagagaggacttcaaaattataaagatgagtactaaaattttctaccttaagaaataagaactcaaacgaaaaatacatttagacttctttcctcctaattttaaatactattcgatcgttgtaacggaaacaagacttaatagttaataacttaatatgggttagtttgggtcaagatttagaaacccatcagtattgtatattactttcacccacaaaaactagtttttcaaagcattagttgttcagtaaaaaggagactagtgttttacaatatacaaaagctgtgaaaatatgt

SEQ ID NO: 28417 - DNA, 573 bp, Arabidopsis thaliana columbia
tgttggatcaaagttaataacagaagaggagctagatacgatcactcttagagctgccatggaagatattctaggtgactaaaaactctacaaagtagaaaacactcacaaatttcaactctcattatctcattgagttggttccaaatgatagggaatggaagaactgatgatggaaatgagcgagcgggcattcaaagctgcgaaagcggacgctgcatcagatgttgctaaacacattatttctattatcaaatccaaagataagtaggtatgttgtatgaaccgtgttacagattacactagtgttgtgaaacaaagtatgtgtatgattgatgagcctcttagtagattttgaggaaacattcttgattgtgttggctaatttggcctagcaatagagagtgaataaaaaaaaatccttatatttggaaatagttgcgtttcttcttcctgttatctttactacttgtatatgaatcaaaactgatcctttgcatcttcttcttaactcaattatctatccgagtccggaaccttctcagctacgcagagtctctcttgagaatgtac

SEQ ID NO: 28418 - DNA, 438 bp, Arabidopsis thaliana columbia
atgcacaaaacaatcagagaggaaccaacttcatgaaaagtttgttactttcttaggatttggcatagtctactcggagggtacagaatgtcctagatcctatgttcctatacattcttgtccccgatcttccgaaaaggttaacatactgcatagaatcttcctttacatccgtgtccccgatcttcccaacagttttgggtttttgacagtaattgttgttctccagggcccttgttgaagtgaaccctattttatacgtggaagaagatacagacaccgaagatgaaaccagccgagatcaatcgggtgaaggacattacagtatttggggatataagccagagaaatggcatccagattgtgtgcagaaacgaggtgttgatgggaaaatgtgtgtggccgttctctctatctcagctgaactaatgatgaaac

SEQ ID NO: 28419 - DNA, 693 bp, Arabidopsis thaliana columbia
tctctacacattttatatcaaataattgcatgaaacgtaagtgttatcctgacaaaaaggaaatacaagtgttttcaactattaccataattatttcctcaaatattgttgaccaattatgaatgcaacagacgtgacaacagcttaattttggtaggtacgagagattaagttaggattatcaatcaactgggcctgtttaaacttaaaaattatgctttttcaaatatataccctcaacaaattcggagttctataaaactatgaactatatatacgtacgtataaatcctttcataatttaaaatattaattaattacatgcccttaattattttaaaaaatcggatgccgttgatttcatttgtttatgcaataatgcatcgtgcttggttgctcgtgcatataatgaacttgaatttaaactggtcgagtatttgcgccgaactaaacgaaaagaactttaatttagataaattaatcgatttaaagttatctttctcgttttttgtttttttcctttttttttaacttatctttctcgttcctagcttacttttacctaaacacaaatataggttaggtactccagttaaggtatcaatgagtaattaagagaaacataactggatagatagaattttctacaaggttcctccgtaagctataagcggtatatactatggtgtaaaa

SEQ ID NO: 28420 - DNA, 560 bp, Arabidopsis thaliana columbia
caatatatacattacatttcttccagtcccagagtgatatctaatgcgtctatctcataaactgtcactgctaatgtataaaccggtgaatagaatttcctgttctcagtagtagtcgacattttaaaaatctgatgcaagaaggcaacaatcaacataccaacttgcacatacataaaaaaaaacataccaacgacccatatacaaaagatagtgagacacgtgatttacacttggttaaatgaattcagaatattaggcacgatataaatttcgttaaaaaaactctttattaaactcaccgcagatccaacaaaaaagtaattaactcactaattaaaaacgaatagcctcacgtaggtgacgcagagcaactcgcacgtgagaaagcgtttaaagtgcgcataaaaatattttaggtgaagataaagtaattgaaaaaagtcgccaactatgacccatttgttccaagagagaatcttgtgataattacatttttacatacgaatatctgggattccattttccaaacgtactggtccacaattgaacacaatgaa

SEQ ID NO: 28421 - DNA, 799 bp, Arabidopsis thaliana columbia
tctgtgtcttgcagctgctaagttggatgcgaacgataaagcctaatggcttagactcatcaaagaagttcaaaggtataagtattgtatattgatcccttaaataacctatcttcgtcttcatacaatgtcatacatatatgttagtattggtgtgcattgaataatgagcatacactctctaaactttgatcatcataattcaaaaatcaatctatctttcaggtggtttatgtagtctaagagctcaggttttctctgatgtccaagacatccgcacaaactccttttccttctacggacacactcatgacccgaatccatccaaagttgaacaggatcttcggtttgatgaagacgaattttgcggatttctggccatcgggacgcttggtacagaccctgagacaccaaagttctcagctatggttgcagaagaagatgcaaccggagaaatcaaggagatggccaagctcattgctaagaaactagaccagtttcttaaggaatatcctgaggatactagaagtaagcgggtaaaaatatcgaatgaatgtcctctacaagattatgatctctttcgatcatccattgagcttaccaagggaagcaatggaagagtaaagaagaaaaagagtttacttacgagtctcttcaagaggagacaaacagtacaaggagaaccttacatagagaaacatagcacaagagatgcgattaaaagggtatttaaaagcttcatggagcttcttcaaagacaagaaatgatgatgaagatgattctatgtccaagaagaag

SEQ ID NO: 28422 - DNA, 626 bp, Arabidopsis thaliana columbia
tgacacggtttttgtgccattaacatttcattagttgcagagatcaaaaagcaatgtaaaacagagacaaaaatcgcagagcttgagtaaatcgagttatacaacaaaacaacaaagccgacttaatcataatcttaaaaagcaaaaccaaaaataaatccattgtatcttctaatcttatttatccttgactgaaagtgtcttgagaaagtttgttcggagaaataatgcattgagaaggctctaataactatctgatttatcgtgtggttgtggctgagatgatttgcaatgtggctgatatgatccgtcttcatcatcatgaatttctccctcaacaatcaattgattaaatttctgggttctctcaaattctagtgttctttgattctgagatttggggattttcgatcttaaatcgggtctactcaggttaaatccggttccgtttagtcctaatgtggttaatgatgtctgggtaacaataaaccgattataaaccatgtttatgtgtgctttaggtttgaattttgattttatgtgttttgaggttttgaactttcaaattagggagaaataggattagaacttttcatttgtgtggaccaagatcgggcgttactaga

SEQ ID NO: 28423 - DNA, 609 bp, Arabidopsis thaliana columbia
aaagctataaatctcggaatcacgatctaaatcaagcaagtaacaatactgatctatgagcagaagaaaaacacatttcaatcacggaaaatctggaagaagaagcttagtagtttacctgagaagaagacggctgtactcgagactcggcggtgacgatggcggtacgggcggcgttaacagtctcaacgctgttattaacaacgttcctcatctttcgaactcagattcacaccgactacaataacatccagatttgcttgcttactactactcagaaaccaccacttggatctactacgcagagagattttcccgagaaaatcaaatgagaaaaggataaataaatcaaataaaaagcgaagaaggttttgtataatgatggatcgaattctctctctctctctctcactcacaccggtcgttatctagtccagcttttcattcaatttcaccacgagcttttgccacgtcatcacattttagatggttcatggttcctttccttcacaccaccacacgcgcttcacttaaaatagttatgcatcatttgggagggtaataacggtttgatcggtttggttcaaccctagaaatgcagatcaattt

SEQ ID NO: 28424 - DNA, 543 bp, Arabidopsis thaliana columbia
agtctgtttgtttgctaacattttccagaacggcaggctcgaattcttttattacaagttgttttttgttttcttgtatgtaatgtctttgttatatctttctgttcaaaatgtggtaaagaaagaggaaacataacatgctaacagaaaaataggaaacatatcatagccgtttcatagtaagttcaaaatttgaagtaagtaattaaaaattattttgctaattcatgaaatttgtgtacagttttttagaaaaaacatacagttgtacaatggagaatagtgtacgaatgcaacagtgatacacaagaacaccaaactacaccaattatcatcgatgaattactgcaaaccacacaaacctttgatctcttctaacttatattgtaatttttaattttaataataattttcacatagttatatctatgctaaattcttatttatatttaagaaatttaatacataccgaatttaatacaccaataacacatgtaaatatttttggatcagagtggttgttcggcccaatggatctagtga

SEQ ID NO: 28425 - DNA, 994 bp, Arabidopsis thaliana
aatataaagcagcctacttatactcaaattattgtgtgggcatctattcgtataagtttagagataaccacctaaagttatcagcctaacagtagtatctcaccctttaaacataccgtgtccctcaaaccagatagtagcatttcaataatctcttctaagatttctggaacatccatatcttcatcctcttgatcatccaaactttctggttgtaagatggcagtcacagtatgatcaggcgccaatctttgagatgaactcgtagacatattctcagaaagagaggcggtttgagcctgcaggtaattcaataaataagtctcggatgactaacagaaaatgactaccaaacattatgtcaatattgacattattcatagagtaaaaatataaaaacacatgacgaggaagagttcctctttgcactactattctacaagctaaaaggtatgtaccacatagcgccaggaaggtgagcgatgaggaagacaaacaagccctatcctctgagttaacttgatcaaatacttgcgaagcagagaacttttagccgccgcgtttgatttgcttagcacagtcacatcattcaaaacaataggaagcacatctagcaacactttccggctagcagtctgccaacatgagtagacatattagatccagatgcaaattggaacaggttaagtaatagaaaccagtaatatttctacaagatacaaaacagataagtcaaattgattatgtactttacagacatctatatatgtttgacgtgttaagtatggaccaaagttaaaacaaagagaattccaggttacaaacagaataaaccttaaaaatggcagatagagcttccattacaccaagcaagcgaaagtggttcgtgacactatcttccttacaagacaaaacttcatatgtccactcaaaaaagctgaaacggaaatgccacaatagaataaagaaaattagttaatccattcacggtgag

SEQ ID NO: 28426 - DNA, 908 bp, Arabidopsis thaliana columbia
cttttatagctcgatagaatcatttgcttacaatttttatatttccctaacagagaatatcattcatatagtaaaacttttttcaaaaaattattaaatcaaagatggaggagtagtaacgagaaaacaataatggagaccaattgggatgattggcatttgagcagccgatgaaggttgttttttgttttgttttttcggcttccctttttttatatagtttcgttaataaattacaaaaactgtatgagctagtgatcaggagatgaaaagcagctcttccaagctctcttatatggatcataagccaaaaaaaagagaagaatgatacagtttttccgtagcttagctttagaagctaaagcctaaagaaagagagaataatctttggaggccatgctatttcttgttacgacatagaatccaacacaatttttcacttcaaaaattggaactaatctacacttttccccgcaagagtaatctaggataacgtttccaagtgacggaactttaattcgtttgggcctccgtttaggcccacagaaagcagaaagccgtattttgaaaaaaaaaagaataaagaccaagtatatatacgaagctcaagctacagtagatggacacaaacttatgttttgtggaatagacgaaaaaactggcgctatattatagtatgtaactcgaaacttcccttttatttatgagaagaaagtgttattacaagtgaggtgccgcagacacatattttacacgtacgttaaaggtaaagggacgtgattacaaactgaccatactttattaagaaaaagaaaaacgttttgatttaagcctcgacaatctcctcgatcaactgttgttgttgcctaccggagcgcgggtcaaagtggtccaagtgtgttgacttg

SEQ ID NO: 28427 - DNA, 565 bp, Arabidopsis thaliana columbia
gccagtgtgctctaaagctttagagaattgaaccacaagctaccagagggcataccgtctatgacggcatccgttcggcctttcagtcctcccccgtttaccagtttgtcatcgagttcatcagttcatctgcgtaggcggctgttgtctaagctcgaccggtgtgttacgggacttttcccgacaaagggcctacattgcgattctagtcagcctggtcctgctggtgcgtacctgttggtgcgtgcctgttagtgcgtaaattcaattcatgtcattcaggaccccaatgttgtcggggcgttagggcgtcggggcgtatttgattgttgtgaaacatggtcgaggtcgagaggagtcgaagatcgtttgttgaaagtgacttgcaagccttaaggatcaggctggttcaggcttgtcgggtctcggcgctctgcgaacggcctaatcctgttcgggtggcgagttgtccgtgaccagctcagggccaccacttcagggccacttaagctccaggcaggtaggtgagcgaccagtaacagtggccggcagggcccgagagctt

SEQ ID NO: 28428 - DNA, 608 bp, Arabidopsis thaliana columbia
gtactactaacgaatatgaattcttattttataaatttgtgtttaaagaatagctaaaataaataaaaaatggtcgaactttttgttagtattcctcctgaaaatctccctaaaagaaaatctttagtagaaaaaggtgataggaatcgttcacgcaataagaaaacagcagcattcgagctaccaaaggtagatctcactcataacctcacaatataaattttgtttgcttgtgttgctttaaatgtcaataccaccacaccatatatttttagatttaagatatagattgaagatcatgttcccactctctagtctctagcattgtactttgagttacattcaactccaccttctcaaaccaaaacaacatcaagttaacaaaagaagcaacatgaatatgatgatgcaaaaactctctattctatttctacatttaatattactagtactactctgcgtccatcctctcaccaccgtagccgaccgcaattccaccgattggtgcgacaaaactccataccctgatccatgcaaatgctacttcaagaaccacaacggatttcaacagccgacacaattatccgagttccgagtaatgctggtgg

SEQ ID NO: 28429 - DNA, 566 bp, Arabidopsis thaliana columbia
atcataaacagaatcatagtctctagaagaaaagccacattgtacaaaagcaaatacctcatcatcattgccttctggttccgtttgcgtctccgtcactctaaccaaagtctctctctttctgaaaactctaaattcaaagccaccagaataagtagacaaagaagtagcagtgctcacgcctcacggattaacaaaagaagaagatgaataaaacaatatacctttcaagcttcagatccttcttccttcgagatgttcctgtttgcccaaaattgagactggaagtagcagctacaaaaggctgaaactgaagactacaacatgagctgcattgcgacaagacgccgaaattgccgcgaaaactagccaccgcgagattcatgtccttaagaaagcgaccaacaaaattcgaaaagtcgagacttttagattctccgatcaaaactctgatgccattattacaaagtaaagatttttaatttatgttcttcagatacttgtacgatttcagatgctgtgtcctctcgtggttctcttatcgttggaaaagagaggatctttca

SEQ ID NO: 28430 - DNA, 1068 bp, Arabidopsis thaliana columbia
cggcatctcttgtttaaaaagacctgaaaaactttccctttcgctgtcttgtaatttatttttctctttttttactatgcagtttatattctcaaccgctcttgatggaaagatcaaggcgtggctctatgataatgttggttctcgggttgattatgacgcaccgggacagtggtgtacaacaatgctctacagtgctgatggaagcaggtacatcattgttatttgaaaagctctggagttgtataacaaaattatgtctctgccataaattgaaatcttctgaacaaaatataggctcatatcattatcaagtaaatatctgctatgatttcagactattttcttgtgggacgagtaaagaaggagactctttcctcgtcgagtggaatgagagtgaaggtgccctaaagaggacatatttaggctttaggaagaaatcagctggagttgttcagtttgatacaacccgtaaccgtttcttggctgttggtgaagacaatcaaataaaattctggaacatggacaatacaaatcttttgacagttgttgaggctgaaggtggacttccggtatgacattcttgcccaaaatactcctcttggctacttgtatataaaatcttttgtattctcgagcctgttactttactgatgctatgtaccgtttatttcagaatctaccccgattgagattcaacaaggatgggaatcttcttgcagttactacagcagataatggattcaagatccttgcaaatactgatggtctcagaaccttaagagcatttgaagcgcggtcttttgaagcatctaaagcatccattgatatgaaggtcttggaataattactctttatgttatccatgaaatatttttattactcatgccttatgtccagtttaactcgagtgtcaataccggtgattcaggtatccactccgcaatggcttcaagcatcagccccgctattggtaaaattgaacacatggacgcaggctctcctgcaaggccaaccccaattcctgtatgatttaaattttagtatatctttgtcaatatatatata

SEQ ID NO: 28431 - DNA, 270 bp, Arabidopsis thaliana columbia
ctaaaagctttgtttttgtaaaaggtttaatgtcaagcatttagttttcagtaatacaatcaaccattaaccaaaatattgttgttttacggatttactccgaagagcttaagtcactattggtaatttacacatatgtcctggaattgtttacatttcaacatgtgtcttttgttaatcttgtgtttagatttatattcgttacataatgcatggtttcacgtaactcgataatgtaacatggttggggttaagaataacaactttgcg

SEQ ID NO: 28432 - DNA, 792 bp, Arabidopsis thaliana columbia
actgcaaacaaactcttaattatttacgaaatttactattagtgtgaattatttcctcttttggcgctaaacttttttagctgtacaagtcacattcaaagtaaagttcaaatatggaatttttttatatgcctagaaatggaatactctttgagaaaagagtacgaatgtattctgctctttaggtaatcaagtacatatgtgaaggaaacataagtttatatccaaaaattggaatcagccaaagccataacaaacaaattaacttaaatctaagaatctgcagactcatctgggctctgaagaatctcacgaatgaagtttatgaaagagcaaagaccacccaagaagttatggtcaatgacaccattaccatcaagaacatgagcaaaatccaccagcttgacttgtggtctagcatcatcatcatttccctttaagatggattcaatctcatagaccattaaaatcgaacaagagttgaaatggtagagcgtttggttctcgaaccaggtcttgagttccagcaactgcgttaagatcccgtgggaaccgccgtaaacactcgaggcaaaagcagagtcaggtttcgagccagtgtccgaaagtaagttagatgatacaaacttcctcagagtcaatctcgctccatctacatcgagcccgcgaagaagcttcctctcgggcttccagaaactcgattctttgtgatcatacacttcgaaaccagagatcctgaaacccgatgacacggttgtggtacccgtgtctttcttcaaacatttttggatg

SEQ ID NO: 28433 - DNA, 778 bp, Arabidopsis thaliana columbia
cttcattgttttctccttctctgttttgttccctagaaaacctctaattccttgtgttgaaagttgaaaccaacaacgtgatgtttttctttaggttatctttgggcaggctcttaaagttggtacctctttgacttttgttggtgaggtaaaggaagtgttccttttgacatgtgtctttattcaggaaatgtggatcctgcaagagtggcgttttagctggttagttcagttacatttttgtccctctgctgttgtactgttgtataggctgttagagacaaagctggtaatctcatgattcaaaaatccaaggaacagtctttaatagtgtttcgtgaatagagctcctttgatgagatggttaataacatgaagtcacagtcagagtaatggacagactcatgtttttttgtaatacacttactttgggaggtgaggtgatgaatcatatttcgttgtgttatttttgcaggctttgtgtaatactcgccaagatcttcggatctattgctgtggctatagccgtcgctgtacggtgtggattatgcaagaaaggttttgttaccattcgtgtggaagaaaaaggacttaggtgacagcagttcacagaatggtagctcagacagcgaagataccgacatcagtgatttctaggactttctggcaagaaaagtctcagggagaagaattacgcaacgaattgatttcacaaaacacacttgtaatctgtgtttaggcaaatcttaacgagtatttgaatctaatcaagtaatca

SEQ ID NO: 28434 - DNA, 703 bp, Arabidopsis thaliana columbia
aggctacattgtgggtgtggaggcttgttgtattggcaactcgtgtctgaagcagacgagcttcacaacttttattgacagtggacaatcatttacttatctaccggaagaaatatacagaaaagttgcacttgagattgacagacatataaacgctacgagtaagaacttcgaaggtgtttcatgggagtattgctatgaatctaggtacactaattctataaaacagatatatagataaagaagctccttacttggtttattatacagataattttctcttaatgttttttggattctcctttttgttttgatggagacagtgctgagccaaaggtgccagcgatcaaactcaagttttcacacaataacacattcgtgattcacaaacctttgtttgtattccaacaaagtcaggttagaccatataaacacattttatgattcctgctagaaagaattaaaacaagatttagattttgatgtattacatcgtcataaaccacttttcaggggcttgttcaattttgcttgcctatcagtcctagtggacaagaaggaataggaagcataggacgtatgtattagtcttatacatattctctcttacatcctcagaccaatatcctccattaagtacactttatattttcattttgcagagaactacatgagagggtatcgaatgggtttcgatagagag

SEQ ID NO: 28435 - DNA, 522 bp, Arabidopsis thaliana columbia
cggctattgcaaacaatgcatatgaacctttgaaaaggtgctccacgggagaagctaaagggtagataagcgtattatcttagtgcagttcacttctagggcccaaaaaataaataaaaagccatttgaccaaaacgatctcaccaccatagtagcctccaagatgcgccattttattgaaccctccatcacataaaaacaaatcttggaccatccttgtgtctccatgacccaaatttccatactctggtcgcaacacacaatcctaacttcccttgggtagtttataggatacgaacagtgatccatcagtgtttttatcagatctaacatcaaaacttatcagtttatatcgagaagtagtgtcatatatagtctctacttggtaatagatagccctgtggatgtaaaccgcacctttcaatggaaagtgaggtccaacacctaggatattctccactgcttcgtcgtgggatccaatgtgaaaaacttgacatgaattctcatacaatactttgtatt

SEQ ID NO: 28436 - DNA, 332 bp, Arabidopsis thaliana columbia
ctaaaggatgatcaagcaaagtttgatgaccattaacggattagtggtgcgtgaactagaaaccaccatcaaggaaggcgacaacgtggaggttggaggtcaacatgtctacaacgatcaaaacgtctgttatctgcttagcgaatcacgccgtgtcaagtccagtgtgacacatgacaacgatcgcaagacggttgacgacctctagttcaatgtcaaagagcgcagttacgcgcgtgagtcgtatgcactgtgatacagcaggagtcttgattcagaccaatgaaggggactttacagacgagattgatgaccctcgtaatgagagtgac

SEQ ID NO: 28437 - DNA, 978 bp, Arabidopsis thaliana columbia
  unsure (1)..(978): unsure at all n locations
gactctagaggaacagggagtgcatctacaaggaagaattaaagttaggtaacatggatcaagacaaaagaaagagtggggttttgtgaatgcaatgaaaataagtaaagagtgcaataaaaataagaaagcaataaaaggaaactgtaaaaggcaatgaaagtaaatttcaataagaagagcggtgtaaaacaagtaaaaacaaaacgctaggtcttcggagttttcttcgggcatcatggttcaacaaaaaggtatagatcccaatctaggtgataacatgcttaggtttgtttacttccaaattctcggacatacaaaactcattcaagaccagctagccccaacggctagtaggtgaaagccagctattctcactaatacctcgcgtactcagttgccctaacggttagtaggtgctaacatggtttgagatacagatcaaaacattaagttcaagttcgattctagtccataagtccctatcactcggcgggcgtgcaacggttatagttctttattcagttgagttagttaaagcaattatacaagattcttccaagtataaactacctaagatcatgtactaggtggcgttccggacatacatgcatgaagattaaattcaaatagaaataatagtgtaaacgatcaaataaaaccataaaaactgccaacttaaacttgatctaaagtccccatgaaaacccttcgaaacccctaaaacctaactagagatctattcacacatattcaaagaacacaacatcatatgaagaagaaattgcataaaaagaaaatgagtatgaaatgggtttagagatcttttctggaaatccaaagcttgatgaatcttcttccttttacaagtagagaatanagaatagaagagaaaagagaaacagatgaatacaagaggaggcgacttggaggcgatgagagcgcatgaggcagcgtaattttgtgggtctgattagg

SEQ ID NO: 28438 - DNA, 728 bp, Arabidopsis thaliana columbia
gtacctggattaagaagacaacaataaaaacacacagttagtaatcgaaatgaaaattgaaaaagaacttgatctaaacaagtctgaaatctcaaatgtaacaaacaaacacccaattggcaacatcgccaaattgataattgttttttagtcaattatcctaaaacaccaatcatgtcgttgtagtattttaggttgtcaatccaaatgggtgtgatgctaagaatcaagatgcaatcagagttcacagagtcaagccaagcaataacaggttttcgggtgttctagtagtcctaagtgaacatgcaggaaacataaattcaaacagataaatcaaaaaactcgaccaacacagcttgctgccaagcactgggtgtggtcgagtgacaggtcgagtaaacagcaaagacactgacaaagatactcgactacacagtctgttgcccgacaactaggtggtcgagtatctggtcgagtaacaggagagaaatgtaaaaactaagcaacaagtaacaagatgcagtaaacaatagcagagtagttaaagaaatcaattagataaagaattcccgaggatggggtaattgagtagttttgtttactcagtttacaggtgattaacatgctcaataaattatcctagacaacaagttcgttaacaaatctaagtgccacgcaacaaagacactcaagttaaactagtccctgactcaatcaccattgacgag

SEQ ID NO: 28439 - DNA, 484 bp, Arabidopsis thaliana columbia
gccagtgtagctttagaggtgaaaacagatatgtttctggggagcgagcagtagatccctcggcggaaacctctgcgacgccgatggaattagataacaaagtgctgaaggaggaaagctaatgaggatacactgttgtattatttgcgatgattgcgtttgtttttctatgcgggtttggacgggttcttcacgattgcatacttccatctcatttctagggttattcaagaacacatacctatttgcattggtgttcatgagcattataacgctcatagatcaaaacgacttaggaaggtcctttgtttgaatcgacgattcgaataagttaaggtttcacgtggaccgaagtgcacgttggccacgttctctattgattcacttcactccttcaaatcacgactagcgcagagtcatcttagtgctgcattacaccaccgggattgaggctgggcttttttccatcgccgcccatttgcag

SEQ ID NO: 28440 - DNA, 462 bp, Arabidopsis thaliana columbia
tgcttcttcaccccctgcaaattaaagcgagttttagagcgttccgattgggaaaaggttaggctctgatcaagagaaagtattcaccagaacataaggatcccaagacaagtttgtgtctgaagatgctgcttcagccataccagtgggaggtccaagaaagctctcacagacttctcttaatctggactcgtctgcctctctgcagacaaaggcacagaccttaagcaggttgactatgatagagttgaaaaatcacaaaaataaaagtaatcccatagcacttcattgtcaagtggaaaaacgcaacagaatctgaaactgagaatatattttaacaaatgcgagacttaatcctcatttatactaaaatgtattcacattcgaactgaaaaaagagtttctatgagaaaagggcacagaccttgctagaaacctcacataggcaaggaggcactggcg

SEQ ID NO: 28441 - DNA, 577 bp, Arabidopsis thaliana columbia
tcggaacgctctaaaactcgctttaatttgcagggggtgaagaagcataaacttttgagaaacgatattctacctgcaatggcgtcaaacagaaaagtgcagcgtctactcaatgagtttatagatctcttatctgaatatgaagacgtagaaacagcagatcctgcccccaagggctcgacacctaccatgaactgtggtggagtcccatcttcactggatcaaattggctctgatcctccagccatgacagctactactcctatgactatagacaatgacaaaccagtctctctggagaatccagcggctttggatataggtgtgtgtgagaaaacgggttctgaggaccgggataaacaagaccagaactcaagagactcgggctcttgaacttctctcgatgttttgtttttgtatatcaagctcagagagctgtgtaaagcttctcagttaggcgttgttaaagattgatagcagagaaaaaggatgagatgtaacagagggatgttgagagtctccaggttagttatatagtgacctggtttgggttttttttttttgtttttgttagttt

SEQ ID NO: 28442 - DNA, 787 bp, Arabidopsis thaliana columbia
ctagacggctacatctgactgcaagcaaaaggctttgttagccgtacacgtgtcaccacctctcatcgttctagccaatgctgctgcagccgatcccgccgatagcaataggtacgagaacacctgcccccattaccaatatttgaacattgcaatgggtttggttagttatttaattagggattaaactaaagatcagcttaacaataaaataattaactcaattcgtagaaaattagtagctaatcgttgagacatgttttcctttattcaatttaaaaatagtatacctggtcatggccaaaatcgaaccagacctgaaaagcttcaggccataaggtggtttctcttgaaaattcccaaacgcaagttcccatttcaaacaccgagtataacgccacgatcgcgtttgccacaaacacgaatctgcaaagcaaaccaaaacaaaaaaagttagattcggttcatgaatttcgaaattgaggaaaaagattgagagaggaatcgaacctgaaagcgtcgaaatcgtaccagtgaggagaagcggagccgcgggaattggtgagcataaagacggcggaagcgagagagaaggagaaagaagcgagacggaggaggaggattaaggagttgaatcgacggagtttctgagctgtgacggttgagtggaagtgagtatggtcccgtaaagtcggagattcgccgttacggaaagcatgcggcgagcgcatggcggagaatgaagatcggagaagataaattacagttaacggtgatgatgggtcta

SEQ ID NO: 28443 - DNA, 2018 bp, Arabidopsis thaliana columbia
ccaactcatttcacaagttgcaatgcaaactgtgcaagagcagaacaacgtggtctgtctagcactaatgtccacaacaacaacaagaagtttccgagcagaaaaatagacagaaaagagagtcagtaatggtgttgggagtttaccagtcaccggtcttaggatgtctgctccaagagggaacttcgaaagtgggagcgagattcatgcctctgtaagtcttcttctgatcatcggtacagctcaataaccgggtaatcggaccgggttggccggatttcaagaagctgtgcatcaaaccaacagtctgccaatcgaagtagttctggcactccaccgagaagagcgtgtggatccgatacggtgccatttgacccgattcatcagccaaaaccgagaccaccagcgcagccacaatcgccgtgatcaaatcccaccgcatctcgattttcgaatttcaaaaccctaactaaatttgcatacttttttcctccgatctaaaaaaagtcaatgcatggaggatgattgatccatggcgatgcgttgcctagttcttctctataaacctgtcgatggttatgattaggtagtggcgaccacgaagaactgccacttgtgactaattaataaataaaaaaagttgagatctttggcatttgaataataaatcaaagattctctctttgaatcgcccaagttttggctgccatggactccggcaaccattttacatacacatacgtccaaaactcggcgacttgcctgtgtttttttttttattctcacaaatattttttttaataaccaaacaaatacaataacaattttcttacaagaattattagtctaaacatgattagtctattttgcacccaaacaaaaaaacatactatagagtattagaccaatccaaattttctatatatccattttatttttaatacaataatatacatttatttctgtcattaggtactatacatttggtatataaatggctttttgattatgtctttcttcttttggaggagtatactccattttttctgttgggaatctcgcatgaactaatagaaacgtagaataataatatacagacaacatagatcagttcatcaattatcattttttattatttggtttaagatcaattatcacttgttcttggattggaacttataagtaattatcgctttgcctttttgatatatatcttttattactgtgtcgatccaaaaaagatgaaggacatcacgttatggtactcaaaatagatggttagccactaacgtaacaagatctaagaccgtataatcacatttccctcgaattagaatcattctccctcgttgacctttatatataagtactatttcctttgcgatgatccgactgtatcaactaactaaaaatacagaaagagaaattaaaagaaagagaggagatcaaatattgtagcaatgagagctttcagcttaatgatatgtgttctcgtcttggcaacgttgattatggtggccgagtctaagtcttcctatagtgggaacgacgagacactcactcctcctcctccgatggctccttcaccgtcaccaactggtactgacggcggtcactttggtgaacccaagacgcttctaccacctccaaacgccgccactttcaccacttgcccgctgttaatcacctcaacattgattagtgccttggctttcgtcttctaatataagacgtgtttttcttcttctttactttgttttgaatttatttccttgttttgttttcaagttcaactcgtgtatactgatctccaactaaccttcgactacgagtattcacaacgatcagataaattttgcgatgtactgataaacgaaactagtacactatccccatttaatttgttgtcttttattctcatagtattatagactttaattagcaaaaaattattgtttggataattattgtttggttacatttaagaatcgtagattaatttctaaattaaaacaaat

SEQ ID NO: 28444 - DNA, 1029 bp, Arabidopsis thaliana columbia
tctagaggcgccaaaatatatcccagaataaatcaattatttcgtcgaaaaatataattaattgttttaatacatttgaccatttgcatataaatctaaaaccatgtccaaaagctgctctaattaagtatatatatgttttttttttcctcatattacaaactgtaaagaaataagaatctctgcactggacagtttatgtttgcatgtgtacatatacataatacatcgaaacgtatataaaacaaaagcgaccaagatgtttgttttctattgtttattctctaattcatatgagctgtatatatatgatgcagatttgatttactctattctcaattacatttttattctgttatcgtatgatttatatagataatctagctatgtgtgttgtcaatctgtccaaataatatctttgagggaatgcattcgtttatacatgtgtacaaatatagatatccaccaaattcaatgattgatccaccgttgacaattacataattcattcatgaaactatgaacacacaggatatgtttcactctcatttctttgctttataattttcttattattatttggccatacctcagttttttatggacgtaacatgaacatcgatattatgaatctgatgattgaccgttaaaattcattgcatcaactctttacaagcttacactcattgcatcaaccgtacgttaacattcttataattttttaattcattgtttcaggttgtcaacgtcaatcttattttcgcagtaatatttaccatcatattctttcctcaacagaaacataaacattctatcacgctgcataataattcctaaatacatcacaccaaaactagtggttaataagcgacataaccaagatgaacctataagctagcaaaccacaaacttgggttttatcttctgatgtttgggcctttcctctaagcccaataaagtaatctagcatcaccaaaactgagagacccacccacacgtttgagcatttttttaaaaaaactattttta

SEQ ID NO: 28445 - DNA, 638 bp, Arabidopsis thaliana columbia
tagtatgaatgggataaagagcttcttggatcatgtaaatattggcaatctccaagaattctatgtagtaggtcttacgtttttctatatatttgtattctaaaattcctgaaattagatcaccatcacactacatgttggttttagagtaatagctttacttctcaccaaaaaaaaaagaaagagagcaatagctctacatgagaaactctttgcacattgcacaaaaaaagaaactcttgcaaaacttgttgaacattgacgataaattttgttttagaatatatagtaacatgcaaccgtcaatctatgcgtctgccattagatctcataccgttacaactgaaggagctttctatccaactagcatatgggtccctcaagaaagcagactctagtgtgttaaccttttcgtgctatatataggtaaggagcctgaacaaaggagacccctataagtatttgctgaatgaaaagagaatagttaatcacagtataacaaaagtcagttcttggtaaatacagagcatttgggtgacattacagtgatgtgttattgtcttttaaaagaagtagaaaagaatggacatgaaacattttaaggattctaaataagggcagatcaagagtatttgggt

SEQ ID NO: 28446 - DNA, 529 bp, Arabidopsis thaliana columbia
ggcagtcccaaatgcagttctactcgatcacagagctagaggagtccatcctgactattctactcgatcgcagaggcgaccaggcagtccactttgcctgtccaccagttctactcgatcgcggaggagaagaaccagtccatcttgacagctgacacacatactcgatcacagaggccaagaagcagcctagaccattctatgttattgtctttaagcatgttgtctgagtagtgattaggatttctgaggatgggatagagtagttgtggaacccctggtcgaatatgttggttaagtgtagagttattgaatcccttttggattagttgtgtttactgcttattcctttctgatcaactggaatccgatcccagacgttccagcgctcaaaaggcgtttaatggaacgttggatctactaattctagtgataatcgtctctatcccaagtgattgaacgtttagagcggttattggctttaacagtcggttcatattgcctgcttagttagagatcgctcttggga

SEQ ID NO: 28447 - DNA, 535 bp, Arabidopsis thaliana columbia
tgaaatctcaaatatagcaaacaaacacccaattggcaacggcgctaaattgataataggtttttatggtcaattaatcctaaaacactaatcatgtcgttgtagtattttaggtgtcaatccaaatgagtgtgatgcaaacaaatgaaatgtgatcagaagtcactaagtcaagccaaacaataacagttttggggtttctaacagtcctaagcgaacatgcagaaaacagaagtaataacagaattactaaaatcactcgaccacaacaggctgatgccagaagtaggatgtggtcgagtaacaggtcgagtaacagacaggaaacaagacaatcttactcgactgcacagtctgttgccagacactgggtgtggtcgagtaagttggtcgagtgattgtaaaaactaagaaacaggcaatgagaacgatcaagcgataacgataaaacagagaaataagatagacgagaaatttctaaggatggggtaatcgagtagagtggtacctagcctattcgaatggttacaagcgc

SEQ ID NO: 28448 - DNA, 342 bp, Arabidopsis thaliana columbia
gaaagataggtgcctcttctgcagcggaaggtttactgtctttatgttcttcgatagctgctcggatctcttccaccactgtgggctccttgaacgtcagtgccaatgtagagatactatccttagcgtcaattacactactcacgcaagcacacttgataccgctggagtccattcgcgactgttatcgtggtgagccaagaattacaggcattggcggcgccacgcctcgaccgattctcagactttaaataggtaggacgtgtcggctgctttgttgatccgtcacacggaatcgagagctccaagtgggccatttttggtaagcagaactggcgatgc

SEQ ID NO: 28449 - DNA, 555 bp, Arabidopsis thaliana columbia
caatatggaaaattttagcatcaaaaataacatttttttgttgttgttgccaatatatcagcatttaaaaaaaaaataaccattcgcaagtatagaaataataaagtctcagtaaaagtgaatgcaactacaagtctctgggatggcaaaattgttagcaataattctgtgtttgtagtacataaaataaaattgattaattgctcgttcttcttttattaataatccgtgttttgttttgtcctttctcttcaatctgggtttggtggggaggttttaagtcaagcgtgcgatatatatatcatcaaaacagacatcctctgttcttgcctcttcttcttcttcttcttcttcatcttcttctatatattggtgtttcatttgttctgctttaaaagtacacaaagattcatcttttttcggtcctctgattgggcaaaagactagctcggtcgtgttttgaacaagagatacatgttttgaaaaattcctcgcaaaagaagagaaagaaagactcaaacttttgtttgaatttgataccattttttatatata

SEQ ID NO: 28450 - DNA, 621 bp, Arabidopsis thaliana columbia
tgaaaaaggtgaagcgtaatttatggcgggggataagtagagtgaattgctgtgtgtgtttggttgggtcgagtggagtcggtggaagttaagatccacttattgcgcctatgcttcttctgttgatagaaaaaaagtgtcttaagattgtttgaaagtaagtcaaaagaagcaaaaaactaaagtgctctctcactaacaagaaaaccattttcctgattgcacaataaatttttgtgtcctttgttttgtcgtgaactcaaccgaaaaatctaagagcaacggcacatgagtttctttattattgtcttggccttttaattaaattgagaggccgaccccataaataaaataaaatgaagagcaagggcaagggccatgtatccatgaagcggaagacgcgtgggttgctgtcgtaagaaccacatagaatgatgccacgtgtaactcgatccgatggggaagcagtgaagcatgtgtacggttactacgcttacgtgttaagtgggatcatttgctggtttacgcttacgataattagcggaattactgctttgcttttctacttagacacttttaagaaagtctgaagtgttgttcactagctgatttgagtagaga

SEQ ID NO: 28451 - DNA, 576 bp, Arabidopsis thaliana columbia
cttcatcttgctgcaagaatgttggtgatgaaaggcaggctcgtctttttcttcccggttttgagagatgagactggcagcgaggttaagttcccggagcacccgtgtttcaagttagtagctgtatctgaacagatcctgagctcgcggtacagtcgggttctgctaacgatggtgaaagtagagccttatagtgaagaggttgaagaagctgctcgtttaatgcatttagagtttagagagaatcatcttaagtggttagaggatggtaatattcactcctctatattcaaacccattgattcttctcagattgacactgattccaaagccttcaaagatccaaaacctaagtatagagggaagtatgtgtaagcaattagttttgtgtttttttcttcttgttgtatgctaaacaatttcgtttttgtctttcttgttgttccaatacaaatagggttactggcaaataattgtgttacaaaatacatcaaaaggagatgagagactccaggaatagctacaaaaaatataccaatccacattcgaaaaatggctaacaatataatacaagaa

SEQ ID NO: 28452 - DNA, 825 bp, Arabidopsis thaliana columbia
atcccgccggccttaccttaagttggaacgaacctatctctatatagtaagcataaacaagaaagtgataattttactgagagataaaacaaattcacagcaaatcaaagacaacatgtgtccattgatgatcgtccaaccggtttagtccatgtggtcatctaatgacacacgggatcgtttcatttcaatacacaagttcatatatgaacgataatcgccagaatcagattcgatggaaaaaaaaacgaaaatttttggaacaattcaaatcgtaaaaatgtgatctttacgaaattcgaccaatatcaattgcagatctagatgctaaacataagaacaatgaacaaaggaaacaattttttttaagcaatttcttatatcaaattgatacccaaaattagctggagaacgaatctaagatcaaagtaaagatttgaagaaatgtaaaatggagcattggagataatgacataaatcaaagacatgaacacatgtgcttagtgtgttagatggagaattggagataatgacatgaaaatcaataggaatcatgtgagagagagagagagtactaacttggagaaggcagcggaggattctttttcgagccaatcgcggatgtgcttgatgttacgccttaagatggtgacagattgccttcacatcgtttttgtaatccgaaacttgactaatgaagctatcccagagagcaaagattcattctagttttgcagtaaagagagagaaaaagagcaaaatctgaatctcagatttcaacaaaaccctagaaattcaagtataacaaaattgaggaacgaactg

SEQ ID NO: 28453 - DNA, 562 bp, Arabidopsis thaliana columbia
agtaacgtccgccagtgtgctctaaagactatgtgacgtggaatgctgacttctatcctttgaatgcaacaatcacaatcgagctaagatattccgactcgcctgaagggacatcagccttcacttctgataagaccgataacagctatggatatatcccgcttcatatgagcaatgagtggcttcaaggcaagcaaaacaatacattgactctttacattattgagctcgattctaccctggaccgaagagcgagtgcccggcacgcgcaacgatcacacttcgtcccaaacccgtggagcactacaaaccatctccgccaccacgtttcaacaagctagcactgtgcatcggtcttcctgtgagtctcgctgttgtgatcatcgttgtggtcactctggtcttctcgatgcggaaatccagagaaacaatcgtgaatagcgcgttctggagccgaaaaaggggatacggcatcggaaaatccaggtctcaacgtctgaaaagcgagacaaagggaagcggtgactctgacggctcgatggctccaaaagatatgcaaatg

SEQ ID NO: 28454 - DNA, 386 bp, Arabidopsis thaliana columbia
tgtaagccaagttacttctctatgtagctatgacctgctataaggtaggaacctaactcaagtttttcattgttattatgttgcagaaagtttctgtgacatggagagaaatgagaagacaagtctgattaatcaaatcttctctcaactatattctcaacaaagatatcaacaaggaagagattaggtcgatactcgataccaggcatgttttgttccgttgatgaataccgtaagagctttgttcctcttctactagaggaaacacgtacagagttgtcctcaagcttgaactgtttgtggaaagctcctgtcttttacataagttccgtggaggctacggcaataaaattaccgagtagaagcgcaaacacggttaagatatc

SEQ ID NO: 28455 - DNA, 505 bp, Arabidopsis thaliana columbia
aaaaaacatgattacgcaatatagaaagtattcataaaactaataatgttttgatgggttaatatttaaaaaaatatcaagataactaaaacaacctttaaagggatactaaataatatcatttttactaacatccagatatttatttggcactcgaatcatttttaagaggtgtttaatctaatttctaaaccaacattatattttgaaaatggtatcatcatgatcctatgtccattaacatattttaacatatattttctgccaacatttttgaggttgatcaactcttaaaatagaagaaaactaaaccatggttttccatttgaataagtgtgaaaggaagcaagaaaacatagccaacgaactgataaagacacataaatatgttggtgaccggtaatttaatttttttgttttgaataatcagcacctaattcttccaacccctaaataatttagtaaaaaaattaaattcaatttactttaactataaaagggatat

SEQ ID NO: 28456 - DNA, 465 bp, Arabidopsis thaliana columbia
ggatttatagtaatgaatgagagagagagagagaacaaaaaaaacctgaagagagaaaagaccaaagctgctccagagaactcaaaagtagattgtgtgttccgtaccctacccatcttatatagccccaaaaaacatcattccaagattagttgactttgggccagaagcccaacgtatgcagtagcccaaacccaatattaagacaacgacaacccgtttatgctgagcatgggtatgatgcttaagttaagacaacgacaaccttttcctcttcgcactttcaaattgggaagtagagcgagtttttaacagttgaattgtagtgctctagtcgaactcaaggtcatttacttagctcatcgtttgaactattagcgaatgggttttgttagttctttgggttttcccttttggttatattgatctactgattagttggaataaagtttttcaacttttttt

SEQ ID NO: 28457 - DNA, 490 bp, Arabidopsis thaliana columbia
gaactcatttatgaacatcatacctacgtagattaagcatcacgcccaagtcttttccttttaacgtttcttcttagctcgtttggaagaagacctcaacgtctcttttctcagatcttccgtagcttttgtgtccaggaacggctgcaaaataagagcaaaatctcaaacaagttaacacatgaaaagccgggttcatcaactttcactgtttaggttccaagtctaacaatttcaatcccaacatcaaagaaccctttggattttatgcccttggtagttctttgcgtttaagctacttcttggtccgacctcgtagtccattataagagtctgatccttagattaattcattggtttcatgctttgatttgtatatctatagagtcgataagcaactaatatgatatataaatcaagactctattaagatagataacaatgggttcattctacatctaaatattgctacaagttcaacaaacaatga

SEQ ID NO: 28458 - DNA, 566 bp, Arabidopsis thaliana columbia
caaacgacaattatcaagattttgtttcttgtgacgaatctaaactaaacaagaagaatcattcaatcaatagatggggattatttggtggttccctcattgatttcgatacaaaatagtgagaaaaaatggtttactagagatcaaaatgcagtaagcagaaactgattataagacataactgcagaaaaaaggggtttagagattgcataaacatctcccaccagaatttacaccacaaattaatcgaatcctaattataacaatctcgtaagactctaatcccaacacatagagcctcaaaaactcgggtttcagataaacgagaaacaaaattacaaaacccagctgatttgaaaccgaaccctaattctctcaatacagagtttcagtaactgtaattggcgattaaagtttacaaaatcgaaaaccgattgctactttcgttaactctaaaatgagaactgcttgtgttaagcaaatcgacaagccaatgtagttcccttaacaaattttgagacggaaaaagatccagagaaagaatcagacaagtatagagagatata

SEQ ID NO: 28459 - DNA, 560 bp, Arabidopsis thaliana columbia
taataaccaaatatttcgattttaaaattaataaccgaattaaccaaaaactacaccgataatttaatcggttattttttgtaaaaatttcagtttctgaaatacttgagaaaccaaacttacctatcccgaaaaagcggaataccccataatcacatgcctagtctgtaatttctctccgaaaacttgtcatttacttaaatcattcaaaaatctactattattttgaaaagagggaatagtaacatataaatatgagaaagtccatattaattagtaagttcaacatacataattaaagaaatctatgttcaaaacaaaaaagattgaaataactattggtctatctaaaaccatggttcgcacttcgcagtagtggatagtgtccggatagtggtcttacctttaaaacccgacccttactttcgatcttctattttagtttgatagagacacgtccgtctactttaagcgttttacgaatcggcgtttcctcttttctccccgcttatcttctcttcctgtccttttcactccgtgactaaaaaaaaaaaaaaagt

SEQ ID NO: 28460 - DNA, 767 bp, Arabidopsis thaliana columbia
gtctaccgttaacacttgtcaaaggtggaacacagaggagctagatgcttatttcaacctattcagcattgggaacctgattttatcgagatcaaaggcgtcacatactgcggatcgtaagtgtgctctacttgttattctctctctctccactcttgttacacatatcattactgatattaatcttctggaaacaaaacaaaaacagctctgcaacgtcaaagttgacaatggagaatgtaccgtggcacacagatgttaaagcattctcagaagctctgtctctgaagagcaatggggagtacgaggttgcttgcgagcacgcccactcttgctgtgttcttctagggagaacggaaaagttcaaagtggatggaaagtggttcacttggattgactatgaaaagttccacgatctggttagttaacccaaacacaaaatatgatcgtctcaaaataaaaattcatgctaactttaagttaacgaaacttttgaatgaattcgcgtaggttgcttctggagaaccgttcacgagcacagactatatggctcaaacaccatcgtgggcggtttatggagcgcaggaaggtgggtttgatccagggcagttgcgttacaagaaggaaaggaatcatcctcctaaaccacaggcggttttagcttaagaaaggagtaggctaaagcttttttgtttttcattgtcgtcttcatatcctaaaccacaggcgattttagcttaagacaggaccaagctaaagctattttg

SEQ ID NO: 28461 - DNA, 948 bp, Arabidopsis thaliana columbia
  unsure (1)..(948): unsure at all n locations
ccaaacataagccttaaagcataagaatttaaacgatctaatatgcggcttagtaccatcacaccattaatcaatactcatataattcatgaaataaatcaatgaatgcaagagtatatgatcatgcaaccaaaaaatcaatcaatcacccaaacaaacactcaaacctatcatgcgccatatcacacgcttcgagactcacagagattcggttgaaggtttaaggttagcttcaacgattctcggacattccatggcttcccaatcttgatcccagctaaatttaactctcctcatcttgatctaacacctcttgatagaagcagccttgattcatgaagctttactccgaataaacatttatgggacgggttcctcggaaggttcttgatcggacagaataacagcatggatttctcgctcatgggcaggagttctcgatcacggacatgatttcttccctcacggtcaaagaatcttagtcacgggcagagtttttcaattgtgggcaagttttctctcggttaaaggcaatttttatgagtcgggcagcctttcggttctatctcctttctctcatcaaatggctcgagtttggtcaagtatttataaatgggacagcttggccaccaagcaaacgcatgtcatctcgtggtgacaccttgcgggacacatgtcgcccgcccgtggagacacatatgctgtagaaatgggacgatgacacgtggaaaaggaaacttcggctccaatcctcttaaatttggcttcaagcaactttgattgggctccaagtaagccagcccacgtgtccatggcgtggtcaaagggcggtcaacgccgtcntggcgaaactttgcccgcgcgaccgccgtattgcccaatcttgcccattcttgcccatctttgcccatttttgccaaatagtaattttgttttccctttgatggt

SEQ ID NO: 28462 - DNA, 1343 bp, Arabidopsis thaliana columbia
aaagagaaaagatgcatcttcggattcaattgtatttgtacgtcaaatggggtcaagaacattgaatcatgtgcaggatttagcaaaaagaaaaatgaagtgataagcttgaaattagttaaaagtggaataataaacttggccatttcgtaggaatacatatttcatatatcaagggtttggatatactcgtattgaatgattatcgaaacttaaatgttgcatgattacgatatatttctttgaatattggaaatttgattagtgactctttattaatatgatagtcgatagagatggtttactgtgctatgatatgcatgacaattgactagagttgactagtaacagcaaaatgaaattcagattctttgtcataatcagaaagtgtttatgttcttgcttttatccaaatgtataaagaaaatttgtaagagaataattagtagccatagattctttttaaccactttcgcagcgtgaagtaaacaacaatggcctttgcattaatttattactttacgtatttctttggttcacccccacctagttttagacacaatcctcatttttcttaccttacttaatcgagccttaaaaataaaaattatatgccttgtatatactataacaaagcaaacaaaaataaagcaatcagaaatagtcaaaacttccttcattggtattttatcaaaattagatattgtacactagtttctaccaaaaaattagataatatagagagacaccccacacgctaaaaaccatgaagcatcacttttttgaaaaaagttttttctaaattggtcataatcctcttttgtttcttttattctctttttgtgaaattgcatcttcagctgtcaaatttacgtagtttcttgctccacacggctggagtcctggagatgccgcgttactgaatctggatggcatcgcagcactatcggcggcaaacgtgtgaaaccacacacacacacctataaaacccatttttagtatcgatcgattcacattaggcccatttatagggtcaggcccatgtaacattcatttcttgaaagaacaggcaagattctaaaacgtaccaaatagacagacaaaaatacatttatcttcgaagtgatacatctccacaaactcaggagtacaaacctttacaagtgaaaaaacgcatcatcatcatccattcacgtcgctttttcccaaccgctctttgccgccgagcgtttggattatagcttctaagagtttgatctcgttatcgcgtttggatatctgttcttgcattcctcgaagctcttccatatgcagcttgaaaacctctgaaaccaagagttgta

SEQ ID NO: 28463 - DNA, 531 bp, Arabidopsis thaliana columbia
aattgagatttgttaaccaactgaattgatcaaggagaccacactattcgattaccccatccttaggaatttctcatccaattgatttctctgtttacttacctgcttcattcacttgctattgaattttagtatttttctgttttcaaacgttatactcgatcacaacagtctactaacagtgagactgcgtgatagagtaaactggtccatttctgcattttcactctctgtcatcctgttgtactcgatcacagggtcccttctggcagtcgaccctgcgatcgagtatatcagtcatttctgtgactttttactgttttctgcatcaacactaggactgttagaaaaccaaccaaattctgcttggcttgacttagcaacttctgaccatatctcatctgtctgcatcacactcatttggattgacacctaaaatactacaacgacatgatagtgttttaggataattgactaaaaacctactatcaatttggcgccgttgccaattgggtgttttctatgctatat

SEQ ID NO: 28464 - DNA, 1257 bp, Arabidopsis thaliana columbia
tgtaaattccaaatatagttcccgtggaatcgaagcatcgatgttccggatccatctagaggtctacaaccacaacgtaaggaccatcatctttgatccaagttggactatcgttttcttcagaagccattactgctactttccctgagtttctaagagaggacaagacgatatcgttctgcaaaacggaaacatgaattgtaagattgaatcttgatatgaatcatgataacaaagagagtaataagatacagaccgagacaatatcgagcggcttaggcgcatctcggtctgacccactagaggagttaacagagagctttccgagtgaagaattgaaaggagaggcgacaagagaagcgattcttttgcaagcatgttgtaagtggtaaagcaacaccacaagatcctctcctacatttttcccttctcctcctccactacctatcagaaaatttcatagaacaacttaaaataataataaatttaagacttcaatcaaactgcttatacagaggaaccgtcaaaagtcaaaacccaaccattgttcgtctaagagagtttccaagatttgtcttactcaattaagcacattttagatgctaaattcagggtatttccactaaagttacggattttcggacatagattgacaatggatgacagacaacacattaacttgaattatcgagacagtgctaagttcgttcagacagagcagtttgttacctgcaaagtctataagagtacagtaaccatcatcatcatctccggtcaaattccgaccaacggcaaggggcttaaaggaagttgactgatggcgagacgccatatcgcgacggttaataccggcggtcggagcagagagaacagaagctgcgatttgtcttagcgggtaaagattgagtcttggcggggaaattggagttgggtaccgagttaaggtaagagattgcattattttctagaatttaaagcatctgcgaaactcaatcccatccgagtacgcttcaaaacggataacgaatagaagatgacgaggagtagaaaaccccacagttcatagtatctgattacggttatttttggaattggattccggttcaattataaaccggttcgattataaaagcaaaggagctgccttttggcatcaacatatattcagctacaaacagattttcagttaccgttacatttacacaaatgattgaacattgattattggacttttcttctttgaagattcacagagtg

SEQ ID NO: 28465 - DNA, 446 bp, Arabidopsis thaliana columbia
ttagctagagaacttttcaataattatcggttgaagcgcggttagacccgcgggcttagtgcctattttaatatcgctagttgatgttataacgtttctatttggagtctcttcatgatttaggtttccattgtcacacacagaaatggtgtgttttggattctcttgtaagtcttatcagaagagaagtttttgagattacattggcagagaagattgggctagagttgggcctgttgatgtttattttgaacaaagtcaatttaaaatccatccaataaggagctttagaagaaaatattttataaaatagaaatgtatgcatgcgaacgaagagacaaactctgtcctaaaccctatgctgatgaagtcaaaacctaaaaacatgatgtaaaatattgcgacaaggctttcgtgtttcacatacacatttgttccagatatgt

SEQ ID NO: 28466 - DNA, 594 bp, Arabidopsis thaliana columbia
tcatacacatagctatatgaatctgaaatatcttctctttctcctgaagagcttcaagagattagagaaacacatgctagtgatacagctattgataaagagaaagattctattgagttaggtcttgctaagctttgtcttgaacagaacattccttacttaggaatctgtagaggatcacaagtaagtctctttttgagtttatgtcttttggttagaacataaaatgttaatgatgatgataagttttgttttggcagattttgaatgttgcttgtggtgggactctttatctagatttagagaaagagctaacgaataagttaccagaagaacgaagaacgatgcatatcgattatgataattatgatggtcatagacatgttgtgaggattgttgagaacagtccacttcattcctggtttaaagattcattagatggtgaaaatatggagattttggttaatagttatcccatcaaggtgtgaagagactggcacaaagatttgtgccaatggcttttgctgctgatgggttaatggaaggttttacgatccggatgcgtataacctgaagaagggagttcataatggg

SEQ ID NO: 28467 - DNA, 552 bp, Arabidopsis thaliana columbia
aaaacacagatacaaactttttaaaagaaaagtcattttaaaagcaagaagaatctgagtaaaaactgaagtaggagcaaacctttaactcagcagaggcgagaaagtactctcgtatgccctggaatatctgttggaccaatgcgtacacaattctctcagaggaaggagcaagcttgcggttccaaagtgtgctatctagaagatcagccaaccgcatttctgttgtctgaatactggaacctgaatcgatgtttgaggcgagatggcttagctttacatctgatcttgacttggtgtctgttgtgccacctaatgcatcttggggaagactaaatcctatggcattacctgatgtcgtattatgctctgttccaccaaatgagtccaagaattgacgtagaccagctcggttctacataacattgagaaacgaaaactactcaatcagaaacggatacttgatggtatgtacacaactcaattggattgaaacagagctatagggctgtacaatggacttgttgtgaagagacatgtacatagcgagtt

SEQ ID NO: 28468 - DNA, 438 bp, Arabidopsis thaliana columbia
caggtgatgctcatcgtgacaagtgtttggggaagcttctggaggcagtccagcacatatgttatatccctgagaacaaacaggctggcgacgaagcaaaggtgggttcagatgcatctcatcttgaacaggatgagaaagacacaaagccggaaaatggaaaggtcttagctaaacgtttcaatcatttttatcacgctaaatattctccctcttcatacagtcacctttcacatttcttcctaccaaaattgaccaaattacctgctatttagaattcagtaattggtggaataactcttttgtttaaactgattgacaggatgagaaatttctctggccagatgctgctgttcctcaagtgtgtgctcttgagaatgcttcacatgcttctcttgcatcggattttcagaaatataccaaaagatgaggacactg

SEQ ID NO: 28469 - DNA, 446 bp, Arabidopsis thaliana columbia
gaatccctaatgagaaactctaaccctaacaagcaaattacgcagacatggagattgaaacaagcaacatatttgagtaagaaagcataaacacagcaaataagaatagagtatgaaaggatctcttcactgtattgaaatttgaatgaatctctaaagaacaagggatgaatagcttatgtctctcaaaaaaacctagatgaaaagcttgataaaacttgatagaaaagaacttaggtctaaacaatgaccttaaaaactatatatatgacctaataaacgttcagggactaataatgcaaataggaaagtcttatggggaaaattttcacttgtctaaacttgaaagcgtcatgaacttctttgggcccgaaaccggtgtcgatcaaccccaaaagtgtgtcgatcgacccaaaagtgtgtcgatcgccccaagagtgtgtcga

SEQ ID NO: 28470 - DNA, 530 bp, Arabidopsis thaliana columbia
ggttacctgtaagacaagtagaatcatgagtaatctagcattactcagtgagctcggtctatgcagaattaaatctctagggtttaatcaacttaataagtaaacttagccatcatatatcacaaaacacgcagcaaacgtattattatatatttataataataccagaatatgcagccgaactagacacatgaatgaaccttgggcccaaaatactgtaaaccttaccaaaaaggtgcaccacaacatcagcacaaactcccgcatacgtgtatacattttctccacatgtatgctatcacacacacgtacgtccacacccacaccacacgtacgtacacaactatgaacacccgagcttataatcggaacatcactttagtgcatcgtcatgcattacccgacatacgctacgagacttgtgccatcatgtaagtgaccactcaggatcaagacttactgacacaatcacaacacaaaaaggaaggtaacagcttacttaaagcatgatggtatcgggtaaccctgaa

SEQ ID NO: 28471 - DNA, 1007 bp, Arabidopsis thaliana columbia
aattatcagtcccattcactaattaaaatcagaggtacacacaaaatcattaaaaacacaaatctctcattagcccgagactcataacataagtaacctagaaatcccaattgatataagaaaaaaatcaatggcagaaacttaacggtgattagagactccgtagagcgatctgagagaagaagatgaatagatcgaagctcctccgacgagaggccgttgaactaatctcctggaaactacttgcatccttcgttctcagttacacgatcgagacaacaaatacagatgtgagagagagaaagaggaagaagaggagagaaatggaatacaagaatttgctgcctcgaggatacaagcaaatgggcctgggccttgacaatatctcattggcgacgataagtaacacctttaaaatgaaaccacgtcactttgtgttggtccgtattacgtaagcccatttattagtgaaacggcaccgtatgacaaatattactattggattacctttcttgttaatcaaagtttaaagttatcataaatatcataacaacttgattgatttttatatatgcttacaattgtgtttgcttgtatattatctcatgatatatataatacgtctaactataaaatatagacttttcttgtcattggtcacaataaacccaaaccaaatagattataaaaaaaaaaaaaaacacacacacacacacaattgaaagacaaaaaatgaagtaagatacataaaaacacactcacagtcacgactgaacttgataagtcttgcgttacaatattttgttttactttattttattaccaaacaaaataacgtttttacttttcaaaaaaattctgatttacttgtgaagcaagtaagatgcctcttcctgcctttctatacgtgctccttctccgttaatttttctcagtcgtcttcttggtagatgcttcctctccgttcttagtgccacgtcttgctgatcttcttccgacaaactcag

SEQ ID NO: 28472 - DNA, 634 bp, Arabidopsis thaliana columbia
tgatgatttatcacttcattttgattctcgtgttttgttttttttctctcaattttgatgaaagaagttagaaccataagcctgaaaagaaaaaaaaatatccattcatttatatttgttattatattccacattagagaattaacagagtaaacatattttgtaacagaggaccgagcagagtaataactagtagcttattattattccaaaagatatgctggagaaccaaaagaaatatataaacgtcggctccaatggcaaaacatcaacaattagcatccaatggcaaaacaataaagtacgactttgatcaaggggccaacagaagcaccttcaagaacagcagaaacaaagagaagagaaggcctcttttgctgaatcaaaacaaacaacaatatcaggcaaatggaactttagtacaataagaaagcagccaattcattattaggtatataaagcctttgtacgtgttcagaaggaggacatggaagtagtcaaatcatagttccaacacatccaatcgttttaagaataccaccaatattccagagtccatggaggtaagccccaaaggaaagtctgaacaagccgcccattttttttttataatataataaatatctcataaata

SEQ ID NO: 28473 - DNA, 531 bp, Arabidopsis thaliana columbia
tattagacaatatctagttaaaacatagcaaaagaaagcttgtggccggtgagaataacaggatcagatggtattgatatgttcgtaatttccactattttgcctcttaataatagtaaacgattaataagggggcgcatgataaaagttcggagattatgatacatactaatagacggatacactagcccatgatgtatgttacaaacgaggattacataatgtaatagtaatctaaagtcttagggactaagagttcctcattttaatttttaatttgaataaaaattaaaatgatcaatataagagtttttaagatgcaagcaacacataaaaacaaaaaataagaaatgaaaaaggaatatttttcattagttagtgtacattttaatagtaatacagtgtatgaccacgacatcatcgaataataataatatgatatcgtatgtaattgttatatagtagtgtgttatataaaagtttccaaagtgcgtgtaacatatgggttcctagtaccttccgggaatggtt

SEQ ID NO: 28474 - DNA, 552 bp, Arabidopsis thaliana columbia
ctcttggctttactcattaagggtttgtatcaaacttgcaggaatcaactttattctctccccaagtcctagtgatgcaaagggactactgactttgtcatccatttgttgtatacaaacttctcgacttctttcaaaccaaaggtattgcctataaacaatttcatcttgaatttttttccagctttcgttaaaatttcgaggccctttaatcttttaatccaaggtaggaggtggagcttttgggatgcaagccttaaaatgtcttgaaaatgcatgcatttgaactctaagtttgctaatacatcaaatgcatgcatttttcagatatttccatcttcagaaaagcaaaggtttggtctttctaatggttgcttcttagacatgtttttgttttttatggttgattgtttgctctaggattaaagaaagcaaacaaaaacacatacacacgaagatacacttaactccaacaaaaacgatatacacaaaagtaaacacatacactaaagacaaacattaacaattctctccctacagggtgaaaagtgg

SEQ ID NO: 28475 - DNA, 506 bp, Arabidopsis thaliana columbia
tgaatgtagtcttttattaaagagtaaaaacgagttcttgtgtttgtctctaaacaaaaacaaaacagagtgaaacaaagacagagatagagagaaagtgtagaaacacaacatgtgtttactgatattgaagccattcatcttctagtaactctgcaatacttatactctgcatttcagaaatactgtattactttattttgcttaaatttagaaataattctaagaagaatggttccgttctcacattgtattttcagataacatttttatcgaggatattaacaaaacacgctatcatataacactagtatggactcaaatttgtagttgtatcataagtcataacaaaaaaaaaacagcttaaacgaaaactaacgtcaatagcttttactgtatccaacaatatctcacactaaacctacaaaattcttttttctataactctccgaagaatcttactcagagatttaagccgtgagttggccaaaacactagtgacatat

SEQ ID NO: 28476 - DNA, 976 bp, Arabidopsis thaliana columbia
tgattacctctggcattagttggaaagcattccaaacatggatacacattgtggtagtccattggagagaagaccactctgaagcatttcagtgcatttctataaggacaaaccggataagctgtctactgttctaagtaggcatgcgattaaaaactgaaccggtttttctgaaccaaattgagatctgagagttcggttagatagttaaccgcttttcttttgtggacttttagtatttttccaacaaacttaaccaaaaaaaataccgaatattcatgaaattataacaatattgctttttttttctggacttttagtatttttttaaccaacttagaccaaaataaaccgaatttcatgaaattataacataattctctcaaaagcacaaacgaaaccaaacataaatttttgtaaggattttaaacacaaccgttttaacccctccaaaaaaaacaaccgaataaaccgataaccgaattcattttttatttggttaattttggtaaccttgctccttaaccgaattcggtaattcggatctccaacaaagtgtagagggtggggtgtatgacatggcttaatatcttgatctcactggttcctagcaacgtaacaaggtgatgacgtggtttttacatttttcaaaaatctcttttgcccagagagagaagaagagacagatcggaaggagttgagtaagaatggcgaagctggtgctcttcaccgccgtaattatcgctattgtctcccatggatcctccgtcgatgacaaatgcgccgcttgtaacgccgtcgctgtacgttggaatctctaactttcctctctttgatttctcaaaattttctgacaaattagagcgagttatatagcgatggcaaatatatttacgtacatgagatttgctagattttgatttgattctattaatgaatttcgaatttctggtcattggcattttctgggggaagt

SEQ ID NO: 28477 - DNA, 784 bp, Arabidopsis thaliana columbia
cctgagcgatgttcaagcaagttatacaagattttgccaagcataaaacgcattaggcggcgcgtcggacatacatgcattaagatcaaactcaactagaaagtacagtttaaacgatcaaacaaaatcatagaaactgccaatctaaaccagatcatagaaactgccaatctaaacaagatctaacatccccatgaatcccctttgaaaccccatcaaacctaattagaaatctactcacacatactcaaagacaataaataacactactcacacatccccaccaatttcttgggctagagtatgcaaatctctggatttagttgtttccgacatttcctcaaaacaccttttggttgtggaaagtctcagattaacttccaattgatccagaaaggaaataacactaagaactcctaatccataagggagtcatgcatataaacacttagctagctaaaagaacagaggaatccacctaaacctaacccattatcaagaactctgaataacactactcaagaacactcaagaatatcatagatctaaacccatcaaaattagaaaaccctgaaatcattataaacttagtttgtgatagatataagcaagataaacaactatgcataagaaatcaaactcaaattctttaacattcaacaggaaaatagattacaaactcagaatacactattatccaccagactaaagataaagatattttgggcaaaaacataaaagtcctatttgtagtaaatcctaggataccctaaaaaggaaaatg

SEQ ID NO: 28478 - DNA, 729 bp, Arabidopsis thaliana columbia
tacatgtgagcaaattgtcaaagcaaaatggatgatgtatgtgaaattggtgattatcgcttcggtaaaaacttatgcatcgaaataataaagttctaggtttccttaagattgtgatacattttgcactctagatcgttttgacataagtttgagcttgtttgtttggtctctcatggctaatgattttttgagatttgcagcatccacgatatactctagaatgatcaatccacataatgattagagtgtctacaaacaagtgaactaatggtcaacaaaaagatgggcgctactcgtgaaattggtgatattcattgatgtatgaacttttgtgtgttggtatgaatcaaccatatgagtcacaagattggatttattaggttttggttaggatataatgttatacatttaatagaagataatatcggttttggtttattgtgttatacttgaaatgagaatgcagtgtggacaaatcatcatggatacgacgtgtttggtgttaacttgggtgggatctagggttccaatatcgaagaagacggcgtaagttcaatctctttctgcgtttttgaatcaattttttaattattcaacttctagattttctcctacaggtattcgattgggaagcagcagtcaaagaaatcgacatggcttgtctgaaaaccacaaacgctcatccaccaattacggcaaatctcactaagccacctgcgaaaagac

SEQ ID NO: 28479 - DNA, 476 bp, Arabidopsis thaliana columbia
cgttttccaaatcaaacaagaatttgataactagctttctaaaaaacaatacttaattcaaaatagtagccacgttatagacttttaaacatgaactaaaagtttttttttttttcaatcaactttacgtgcttaaaaagatagtatcagtttaggtatctcataatccttatttggtttcatcatccttaattacctaaattttccctaataatactttcttgagcaaaaaaatattatccatttagttatagtctctgaatccttctagtgagctacactcacttacacatatatactaacaaactaaaaattataactctttcacacacacttggatgacattgtctttaatttagaaacataatgggtcagagtttcaataacaggcctaaaagtacaaaataaaagcccatgtcatctcataggcccattttcttaataacgttcttggcttaaccctaacgaacaagaaa

SEQ ID NO: 28480 - DNA, 785 bp, Arabidopsis thaliana columbia
atcatactagcttttaacgatgaaatttctatatacagtaactcattattaatttgctcgaaacattattaaccccaaaataacataattagtaaactgtttttgacatttttgtaatgtcagtccagattaattattggattttattcacctactaaacttcgatattacttaaaacaatttgcgaaatattttgtacatatcaaaaccgcttaatatttaatttctttctcttattaaaaagaaaaactcaccttttacacttttacagtgtacggacaattgaaaacgaaacgtttagaaacataaaatgatcttttattaataccaaaaatgaaataaaatgatgcatttaaaaatctcagcaaacaagaataaaacacgtgtcagtgtagggagagtttgtcgttttcacctgacaccgccatactctcaccttcatttgctttatgagcttcttcgcctcacaaaacctccaaaaaccctaaagaaccagagagagagagatctcaaaaagcaaaaccataaccctaaagagcctctgaaatctccagccgccgaaacatgtctatcccgcacatcgctccggtacctcaccctcgcggtactgatctttaacccaaagattattacttcccatttcaatagaaatcttttattttgtcgactgatacatatacatttctgtttttgtgtgtatgtgtgtgtgtagatgggtattcgctacaacaatccgtacaagtgacggccacaaggttttctgagtcaagtactggagagccatg

SEQ ID NO: 28481 - DNA, 848 bp, Arabidopsis thaliana columbia
gataacagcgccaaattgataataggtttttatggtcaattatcctaaaacacctatcatgtcattgtagtattttaggtgtcaatccaaatgggtgtgatgcagacaaatgagatgtgatcagaagtcactaagtcaagccaagcaataacagttttggggtttctaacagtcctaagtgaacatgcagaaaacagaaagaataacagaattactaaaatcactcgaccacaacaggctaatgccaggagtaggatgtggtcgagtaacaggcaggatatgacacagatatactcgactgcacagtctgttgctagacactgggtgtggtcgagtatactggtcgagtaacagacaggacatgaaacaactgcactcgactgcacagtctgttgccagacactgggtgtggtcgagtaagttggtcgagtaattgcaaaaactaagaaacaggcaatgacaacgattaagcgataacaataaaacagagaaataagatagacgagaaattcctaaggatagggtaatcgagtagagtggtatcctagcctattcgaatggttaacaagcgcaatcaagctatccctagacaacaggttcaacaacagattaattcactcccgtgatagaaatcctcaagcaaagctagcccagactaattcccattaacggaatctaactatgcaggcaataagaacagacttataaagtcaataaacgctctaatcggccaatcccttgggatagagacgaatatctcaggaactagtcgatcgaacattccatcgaacaccttctgggtgcgggaatgcttgggttgaattccagttgatcataaagaaataagc

SEQ ID NO: 28482 - DNA, 621 bp, Arabidopsis thaliana columbia
tgtctaacatgacaaaaattgtaaataaggaaatttttttacgtaattgggatgaaaatgtcttgtgatccaattttctgaaattaaactgcgtccttaatatttgaaacttagcgtttttaatccattttcagtcgtatttttaacagaaacttgccacataaaattactatatgtttgtcaaaatttgttatacgttaatcccgctattagtttcagctatttatatataatatatggacttcaacttgatgtttcacaagtatcgttgaaattcgacatccgttttctctatagatattttgtccgatcacgtttgaattttgacattttttttgtttatgttttcgccattttgatatttatatacttattatctttttaagaaacttatgtcggtatttgacatattaatacatttttgtaagaaaatggataaagatagttagctactaatgacgtcaaaatgcatgcgtcttgctgacgagtgaaggcctcaataatggtggtgtgagtcagtgagtggtgtaggttgattgtgtggcggctgcataataaataaataatgttgttgcaaaagatattcatatattcgtagtgactagtgactagtgagtaagt

SEQ ID NO: 28483 - DNA, 536 bp, Arabidopsis thaliana columbia
ttaccagtaacactcttaccaatttgtcttgctatggcgttggagctgattgccagagcaaaactcgattgaatctgtacaataatatgtttgtaaaatattatcagacctattttgtatatacatattgcactaaaatcttatatgaaatatcaatgaccatctagataatcatatcctttacatataagggatgatgttcaaaggtttgagcttggactgtacatatttagagacttatttcttaacctaattaaacattataaatattttatttacacttactatgattttattagagtatcgtaccagttagatatatatgagggtggttcgagatctagacttattcgtttgaaaagtaaatctgcattttgttcgtttcatgccacaaaaacgacagcttgccattgtatccagccattgcgtcattccagcagaaatactgcactaaaagctaacatggtggtgatgcatgtattagcgacttgccaagtttgcattaaaacgttttttctatagttcagagactggcg

SEQ ID NO: 28484 - DNA, 420 bp, Arabidopsis thaliana columbia
  unsure (1)..(420): unsure at all n locations
acatcatagttataagattacgtttacaaattttagaaaacgtataattatatcaaaagtttaattaaattgttaatttccaaatgttaataatatccacactctaaacgaagtgcatatgtcattctgtgacaacaagacgtgacattagaaactcgttatgtatctctcattccaatacaattcattaaatcacatggtagaagtgcatatctaaaaacaaatacttgcgtttcaaattcatccgttcggatattaatggagtactacatgttcatatgagatcattggattaaaattattactcacagagtttacaaagaaaaatgacaaaataaaaagtcaagtttttttggttttaatggaaaagaatgcttgtattatantatgaacgtaaagttttcataaagagagataaat

SEQ ID NO: 28485 - DNA, 568 bp, Arabidopsis thaliana columbia
caatgaaaagtagtcaaaatctctacttcatgaaccgttttctcatcagatggaacctaagtgaccaccaatgtaatgaagcagactgcagaaattgtccagtgagtactgctacatcaatggaggttcggcacatggttgaacccgactggttatatctagctgagctttcaaaatgctcaacctcaaatcattctatttcatcctcacaaaaagctctcaggtccttaaagttgatcccagccgctgcaagaaaaagccttcctgtcttggtcaatcactgtggattactactctgcataccagtatgtgaaatcaccattttaaatcatttgttttgtcggatttaactataagaccatacattgattctcgtctctgtgttttcaggctattggcttcagttattgttcatgccttgaggcatctgcagtgtttcttccaagaataccactcggaggcggtcatagctcatttctctagtctagccatatcatgttgcattcattcaatactaacagacatttattcacttgtactgaattctcgtgaacgaaataatatttga

SEQ ID NO: 28486 - DNA, 523 bp, Arabidopsis thaliana columbia
aaatgtgttatcaaaagtagtaatgtttatttgaaatttgaatataacctaattaggtgatagtaagaactaatgtgcctcgtatagatcacacaaactctaggtcatatggtttagcttaaatcttcagaatcacatatacggagaattttctaaattttaaagtcgaaaaatagaagcaaaacagtaaggctgacatgaaaataaaatatgaatttagatgaaactagggagctgggaaggcaatgtgtataatatttttattcaactgtcctgaaattatgggtctataaaaagattacacgtctctgtctccatgtcagctatgcatggagtaacaaatatcatattctgacaccacataaacaacattttctagatcattaagaaatctagaatgtgttaacaagtttgaatgattctaatgaggactggattatgatatagaacatatctgattcaactaagaagtaagaccattgttcgtttcgaaatgaaggcttgaacaaaaaattatcatttt

SEQ ID NO: 28487 - DNA, 761 bp, Arabidopsis thaliana columbia
ggagatgatcaaagagttgagacgccccggtgactcaaccgcagattacccatataatggtgtgtgagttgtgcttcagctgatgaagacatgtggatactctgagaaaaacagggttgggtttaatcgtcttatcaacttttgaactcgttccatgtgatcatgtctcctcttttctctatgatgccaatgactattattggtattagatattgaatcttcctgaactagtcctgcacattcatttatccattcggttacggttatatccattcggttatcggtttttcggttctaaaatttagtatctattcggttattttgaaagtttggttcggttttggttctttcggttttaaaatttaatatccattttgttattttgctttgaatattttcggatatttcggttatttttgaatatttttagatatttttggatattttcggttatttttcaaatacgtttaccattttgtatatattttcaactatttttagttatttagtatagaaataactaatatttttaaaaatatatttatattccggatattttcggttacccaacatatttcggttacccaaaatatttcggttattatccattcggtttcggttctttcggttatagaatttagtttcccttcggttatttttcaattttcggttcgatttggtttggtttcggtttggtacattcggttcggtttattagccgaggcctatcctaaacaatggagagaacatttggtttttgt

SEQ ID NO: 28488 - DNA, 659 bp, Arabidopsis thaliana columbia
  unsure (1)..(659): unsure at all n locations
ggatcgatcccctttattccaatttctttaacccatttcatagctgctttctaagaactttacacatggttccacatgtaaagaatcatcaaacatcacaaatgtaacgccccggccatctctatcagcgggcttcacatcctttcacggacccatggatccatccctgccaatggtcggtccactatgtctggaaggctttaaatacttgtttaccgaccttataaattaccagatattctttctccatgttttgtcctcattcgcacagttccgacaattacttcctagaaggtcactcattctgaaattactccacaacccaatcactcttaattgtaaagttttcttaggatgtttgaccaacaaggtaagtgcattttggtggcataagtgaccaaatcaattcttttaaacctctttgtatgcatcaccatattcctgaaaccggagtgttacaacaaatttgcggtcacaccattgaaatatcatgcactcatgcatacccaattttttttgttttttgaaacagtttggtgcattaatctaaaggtagcaaatagtacaagcctatgtcctagatatcatagagtagttttttataaaagtacatgatagtaggtgatacattgnnagtagaatcacaagagaagggagag

SEQ ID NO: 28489 - DNA, 621 bp, Arabidopsis thaliana columbia
aaaaaaatatagaatatgcttctcacccacaaaaaaaaaaaacgttttgccaaaatttcttaaatggatgacaaaagaaggttgaaaaaagggtaaattgtaggtcacacccgttgaccatgttttatttccatggattgtcaaagtcaaatgtggttttcatcatttgtcttttcgtctgcaaaatgacgtttctgcccttgcgcttctctcttagtaattgttgaaatgtacggtttagtttagtaggtttagttacgtacactgttccggttcagttaaagattttttgtttcacgttgacgcgattcggttccgttacaagtgagattatttccattattccgaagtgacatcaacatttaatgcccccaaaaagtttagatgtgactattgtcacaattaatgcaaaatcatcattacatcaaataatattaaaaaaattattgataataattaataaaacacttgttgagataaagaagatgaacccaagaacaaagaattattgagaacggacattgctgctgaagaagtgttgatcttgtttttgtaccaagtttggagccaaaacaagcattgctcgtgtaagtaatgaagttcttttaagaagttttttgt

SEQ ID NO: 28490 - DNA, 602 bp, Arabidopsis thaliana columbia
caaaatcatgacaactgttttcagtttagaaatgaatattgcagacagacataccaatctaacttgtaccactaaccatctaaatcataatgtatacagggatagcaactaggcttaagcgcttatgtataccgcatatttgaagaaacagagaatatgaataaaggaagcatagattaactgtttccttatgaactaccttccgtggaatttcaaaaataaaaagttcattccacttggaagtgcactccatcaagtcgttgacaattgtagtggaaggcttgacacactttgtcctagcactttgaggaaaaagcttttgtggttctgcaccctgactatcaacaacgaggcgtagggtgcaaaagaaactgtgactgttaccatcatcaataatatgcaaaccctgaacaaaaaagtgaaggtgtcatcttaaccatacaaattctaacatgccactataagtacttcaaatgatgctcttgtatagagataccttagcctcaagaatctgtacagtcatgtaattgcgtgcttctctagaactgtctgcaacatttaaccgattggagaaccttggagggggaaccagacagaagtgt

SEQ ID NO: 28491 - DNA, 404 bp, Arabidopsis thaliana columbia
  unsure (1)..(404): unsure at all n locations
actctagatcccccacatctggaaagacaaattttgttaaccggtgccacacaaacagattattatttttattattcccaagtaaaagacataaacaatatctaactattaaatcttatcccattaacatttattattaagtttatatatatatatatatatatgtattattatttatgtttattattctaaatacgaacattgattccataattcatttttttttttaatttgtttcaatactctactctatcgaattttgaaaattttggaccattataattgggtttcgtgattttattgaccaaataattaattgattatatgttttttgaaccttgtagtgcggcngattanaattattttttaaaacaattttaaaatctggatagtaattaagcatt

SEQ ID NO: 28492 - DNA, 469 bp, Arabidopsis thaliana columbia
gcttcaaattccgctctctgtcattgtaacatatggacaaattccaaaagccctattcaattccaaccccaatatctttatgatcatcatcataacgtgaacaccaaaaacaagggcaaaaatttcaaaggctcttaaaaataacaatatcccggaagcaaagattagctgcaactgcaagggaaagccaagccctattatagaaaagcaacttcattagttaagccctatctctcaatatgctcacatgcatgcattgaccaaatgtcttcttttatctacaggtactcagtcactttcttagttacacactagattaactcaattcttctgcaacctcattatctccaaagtaaaagaccactgttattgatgtttttatggataatatatgatgattcatctttattacattagctgaatacagaacaacaaccaatttactcgattattttgaaagatgtatgta

SEQ ID NO: 28493 - DNA, 258 bp, Arabidopsis thaliana columbia
gttcacatttcggagcaaaatcaattttgagcttttagggacaagcaaaggtggtcggattcctaggttaaggaaggcgaacgaagaagaagaagagagaggagaaatggtaagaagaagagagattaagaagaaggaagaagaggaagatgagaatggatggaggagaaaacagaggagagaaaggatgagacagagtcttgggagagaagatggcaagacagtgattagaagtgagcagaagggtgttttgggaag

SEQ ID NO: 28494 - DNA, 567 bp, Arabidopsis thaliana columbia
agactataaatacttttaaaatacaaatagagcatttaaagcttcactctttgttaaatttctcttgttttattttgtcaacactaaagtactctaatcctctgtttttattggaaccattttgtaattctgaattattatttgttgttaaaatggactcttgaattactctgctttagtatgaaatattttatttatgcatttcaaaagcttattgtctgcattttctttttgtcatgttattataacattactagggatatttaatctattcatattatgatgatatttaactacttgtaacatatgcaattatgatgaacagcttctccgaacaatggtttcacggcgcagtctccttgacacacttggaccttcaacggaaggtcatgcatgtacgagatccatgtgatggacatgctcttcatgcgcactctggacctccgataaggtttgcccattaatatgaaagaaagtgctttgttttctaggaattgaactcgaaacctaggtgtagaagtattaataaacttttagttactattgaaacaaatggacctcactata

SEQ ID NO: 28495 - DNA, 482 bp, Arabidopsis thaliana columbia
cccccctcgtcgaagtaatcgtcgaaatcgaagttatacctcacatttcgctgcctttgacctcgccggagctcatatcccgattcacgcggagatgaactactacgccgcgccgccagatctgccttcgacggacgacctttcctccgtcgtctcgcgatctgactcatcttcttcttcttcttcttcttcttcttctctatcgaactcagtgcacaacacccaatccctttctctctctatacagctaaggtctctctctctctctctgcaactttctatttttttccgggtaggagagagaaaggaagaaaatgaagaaacttttggtcaaccgaagctaagtctgaaccttaggttcggatataatttgatgtattcaaaaaaaacctgcgcgatggtaaacgccgtcaattagacgacgttagctactactacccgttgcccggcttacttaattttgttatttttttattaattgt

SEQ ID NO: 28496 - DNA, 633 bp, Arabidopsis thaliana columbia
tgctagcttaatcttgacattcaattcattgtgtgaacaaaagaactttgaggaaattcgatccttaaatactgcaatcgatctcttatttgagagagtatgtttaaggcaatttgaatcatatcagttaccaaatctcacggagacgaactgatcagagcaacaagttgacacgaaataggaatacatgagagacattggagataccgagatatcgaggaggcaatccgatgttgtacagattcaactttgggagaagagaaatgaaccgtcaagagagaagcaaaagccaccaaagtccgccaagacttagcaaagagaaccacccgacaaagacgacgacgtgactccactctgtgaccagcaaacgagaacgacgacccaagaacaccatcgaccaacagatccgacacatctgagtaccaagacccagcctcattagatctacccccacaacacctactactccaaatcgtatagcctccatgcttccacaaacaaagaagttaacacaagaaataaaaaattaagcagagaaacaaaaaaggtgatcgacgccggcgctatttgagcaccacacgccggttcaagcagacagacctttgtgttaggcaggaagcgagagagaaacaa

SEQ ID NO: 28497 - DNA, 726 bp, Arabidopsis thaliana columbia
cccaaaggccaaaacacatgctctcgtagtcgcacttatataatcaataactgctaaagattactattgtcacgtacgtgatctatattctcttcacatgattagagaaaatgatttcaattataatggtgtctccagcaatttaaatatatatgcaagtataattgatcttaaattatatatacaaaatacttcagatcatagagcgattttttagctgcaatgtttcaaaccataaaacgtgcattgctcctttaaattctctttttaatgtgtggttaaatttttcttagtggatatcttattactgtcctttacaaagatatcaatgtaatagtgaaagatatattaaaatatctgagagatatcatatgcacaataatcaagtacagtgtatcaaatatcgaatggtgactgcgttttgcggtacgggagaagtgcggtgtggttcaaatagtaacaaaaatatatagatatatatgtatatgcagagattttgatactgttacagcactgttgcggtgcggttttgggtgcgattttggttaccattcacagcatatgtatattcaactgcagacactattatcagatgtcatttctaacaaaaaagtaaagataaacagaaagaatcacttggtgatcatattatattactccttctactaccaaagaagaaataaacagatacttcataatatcaaatatagcaaacaaacaccaaac

SEQ ID NO: 28498 - DNA, 1392 bp, Arabidopsis thaliana columbia
cccaacctatcttccctttagagccaccagagagtcttagcgatcaagaaactcgcagaaatgccaagtacaattcagaactctacaagtcaatgcaatgccataatcacatctaccattttgacacaaactaaacctgattttttgtcaaaataatcaatgctaagttgcaaactaatagcatgttcattaaaaactgaaagctacgatttgagcaggactcaaatgtacaatctgacactcaaatcaaaggaaacaaccaattgctcatttcaaaacaaacagaatatttcaaagaagtatagcatcacagaagaagtgaagtaaaaccagaagcatcagcatcaagatatccaaaaagattaaactttcaacctatctttccaaatagagcaaccagagattcttaacaccatcaataaaatccacaatgcagagattactcggacatataatgccaagcaaaattcacaactcgacaagtcaatgcaatgccacgatgatgatcacatctaccatttacgccgcaagctaatcctaagttatcgtcagggcatgaaccaaaatactcaatgctaagagttcgttaaagattgaatcacaatacagagtcatccaaaattcagaacccaaatttcaacacaaagaagaaagtctcttactttcagagtatcagaagctttcttgagttcaatttcaagttccatcatagtagtagcttcactagccctaataacagccgcaagagcacgaatcgccgcaacagcctccgccaaatcaggttgctgtctccaactattaaagtcctcaatcacgctaaagggtcttcccgaaactaaggaatcacgatcagggtaacgtcgaaccgcggcttgagcctgctccaaccactcgctagtcacaattccatgatgcgccgctctggtttggtaataagccgaaataggattagggttagggttttcatccgccattgaagcagatggtggtggaggagaatcaattgaatgagttagagaaatgggtttgttgttctgatgcttatcgaggataaacgaagccgattctctccacattttgatgaattcttcgaaaatctcagtttcaagctagagactttggggtttatgcctcatgcctgtaataacatttaatttagctttaagaacttcattaacaataatattatcatttggctctccaaaattgtatatttacatttacgaccctaaagtttacacaatagttcaatctcacccctactaatcatcacaatttacatttgagaagactatatgctataacaatacccattattaaagagtgatctacttgtggctccaccatcattgttaatacatctttcccaagatctaaacttttgatatttga

SEQ ID NO: 28499 - DNA, 1203 bp, Arabidopsis thaliana columbia
gaggatcacaggatcccccaaaatcttatcctcgtatatatattttttttgttttgacagcattttatcaactattagtttttcctgttctttttcttcttctaatcatttcttacttcaattcaacgactagtcattagttcatgttgattccattcctctcgtcgtcattctgattcatcagtaaatatcatattctcgaggaaaattaacaactccacttactcatacttatacgacccgtttaaaatatttttattgataggtcgcttgtggaaattggtttgaaactcaaacaaattaaatgactctaaaatttgataagcttccaattaaaaaaaaaacatgttagaaatatggtgataccaatgttcaataagtatctaaacagtccaggtcaaaaccttgacattaatatgctaacaattagtggaaggaacactgcaaaacaaattaacatttctaaatatatatgcacatgtagctttggatgagtatggtctgtatggaggacattgtacgatcttcgaagatacgtataaggattttggggtttagcgttgaagaaagtagtagatgggagaagtctagtcttagattggtactcaatagtttcagtggaagcagcttcagaactatggaataaagttaatactatgtgtgaacgcacgactaaatatgcaacattttgttttactgcgttttagatcgtctagcgactttagctacgtcaatttttcaatgcaagtattcttggtcttacattttgggggcattccaaatttttcatttagtaaatgtatctggcttataatcgcgaccaatcttgacccctaaaaacaaggcggaccaatcttgacgacccctaagaaactgacggtaaaatgttattgctttgtgtactgtcaaatttatttttaaaaaattgcgagtttggaattctaattcaaggtataaagtttatttgataatttatacgtcaagtttaacagcaacaaaaaaaagattatttatacgtcaacattatgataacatataagataacaaattattcgtttgtaaacagttgaatgataaataaatggtatacaacaaaatttcctaattagaagtccaattaccttttacttcatttttctccatttttgacgagtttcaagaatattatttatatttcactagctaatctcaaactttgcaggt

SEQ ID NO: 28500 - DNA, 528 bp, Arabidopsis thaliana columbia
gtaaagtagtcgtatttttccaggatttgattactttttttacacataaactcaaatatatacagttttaaggtgaggattaaattgaaataaataaaggttgcaattacatagattgaagttgtcttccaaaaatgacaagtttaagaatttctctttgtttttttcatttttaataaacaactaattttgaaaaatccaaatctaaaaaataaaatgcttctatatatcatatatgtaagatggtgacataaaaatatatttataacacgactgaatatcatatgcatgattcaaagtcttatccattgtggaataagttttttttatttattttgatattacacgccaacacaaactgtaaattacaagattagaatgatataatcgtattctttaataatattacacacgagattcacaatagttccaaacatattaccagcataatttattgtttaagcacatgggtgatgaggccaggaatgtgggtgtttgtgatataagtgtcctgacaatggacttggg

SEQ ID NO: 28501 - DNA, 147 bp, Arabidopsis thaliana columbia
gacggtgccagtctgcacaaatgtatccggcctctcgcgagtgggccgctgttgcgacgtgccttgatgagatccgcgcgcctcgttcccagataaatgcttcgggctttctgcccgcttttttgacggggcttacgatgcgctggg

SEQ ID NO: 28502 - DNA, 528 bp, Arabidopsis thaliana columbia
tttgaaaaaagtacaaattaaaacagacccgttaaaagaaaatacatcatggaacatgtgagggttggatttgggttgcacagttgcgcctgtggtggacgtggattccccgccacagtagttaaaagatgtggtccttcaatttgaaagttaacgtgtggcctcaaactgtataataaattgtatacatttacgcatgtatctacattttttcaatggccaattaattttttcccggtcaaatagagcccacatataactacgttaaattagaaaaataaataaataataataattagaagcaagaaaacaaaataggtaaacaactatatatcttttgaagttaactattgtttcgaataattccagcaaataaccaacgtgctgttggtctaatggtaaatctctcaggtgaaagtactggattcaagacacgttgggagggatcttttttcaaaaggagatgaatttaacctggtgtgggttccgctctcggagaacttcaaacattcaaaaattttttttttg

SEQ ID NO: 28503 - DNA, 547 bp, Arabidopsis thaliana columbia
cattatttaattttcattattgtcactatcattctgcaaaaaagtgtaaaaatgtactaatatttttcttaaacaaaatgataagaatgaagtcgtccaaaatgtgttttaacctattttagtaaacctggacaaaactgacgaaaaaaaaaaaaagtaattggacaaaacaaaaatagtcatttaaaaaaattatatatcatgatatagagctacctaatgcagatacttagaaaactaagattcattattctctgataaagaaaataatcacccacgaaactactcaattataaaaaaactagtccattattaattggaatatacttaagtgtagtttttgttaacataaatggaggtgtatatatagttggtgccggcaagaaaagatggaggaaggattgtatcggtcccctaccccatgatcccgccagtaaattctttctagggcacccaaccatccacgtgtatcctcaaacctacaacctgtaaatgtaaaccattacattacattgtatcttatttaatactgtacttaccaaaaagt

SEQ ID NO: 28504 - DNA, 516 bp, Arabidopsis thaliana columbia
ccagcataagtacaacgaaaacaacatgttttgttacaaaaaacgcaacaatcattgttctcccacttgcaaagataacatagtggaagaagtataaaaagtaacagatgtgacagtgaaaagcgcgtgcaaagaggagagtagatacgtatccatagcattaaatgcggcgtcagagagtttcagctttcaaggtattaaactgttaaaaaatgaaaactttttcttatgtgtaccaatcttaacacacgctatatatgtgcttctcacgtacgctacatcttatcgactcaagtaggtgacacgtctcaaatgacgtcagcgttacgacagagcaagttgagcacgaagatatagtgtatcttacctcgggacaagttgatgtgtaaaaacatgagtatatggtaaatcacttggttctacttccgataacatgcaatacaaataaagaacaagtacatgtttgatgcgacattcgtgaagagatcttctcgccgccctcgggtgttgggaggg

SEQ ID NO: 28505 - DNA, 437 bp, Arabidopsis thaliana columbia
tatcgaaccagatataaccaaaaggggcaaaattgactcgaaaaccctagttctcgatacacggctaggtaatgacaatcgcacacagacaaatctggttatacagaacttcgaagcaagaaaaaaacgatgaagaatggatcatccaataaatcgactagactcaatcttcacaggtttatcgatccagcaaacttaaaagacggacctttattttcaaactggaatgggacaaaacccgaaactctattgtcgtaaaatcagatcgcggagacagtaacagaaaaaacattaaaaagtaatggaaagacctaaacccctgatctaaatacaaacaaatcatacctgttcttcgcctgagctgacttttgttttgttttgtttttttgtctttcgtaacaaaagcagtaataggggatgattgaagtagtggttgt

SEQ ID NO: 28506 - DNA, 475 bp, Arabidopsis thaliana
tttttttttttctttttcttctttctctctctcaccatcacatagaacacagaagaatccatggctgcttcttcatcctccgctgcttccttctttggagtccgacaagatgaccaatctcacctcctcccacctaattcctccgccgctgctcctcctcctccacctcctcaccaccaggcaccgctgccaccgcttgaagctccaccgcagaaaaagaagagaaaccaaccaagaactccaagtaagttaattacctcttaattcaaatcttttataatcatgtgatcatttcttaaaagaacttattgattggtgaaaaagataaatcccttttccatgtccttttttttcttctcccttttacattttttaaaatcttgaaataagcaaattagcaaaccctagcttgtagttggtttttcaaaattcagatttcaatcaatttatcttccatgcaatataagacttttag

SEQ ID NO: 28507 - DNA, 737 bp, Arabidopsis thaliana columbia
cgccagtgtgctctaaagcattagtaactacttacaccactcacacgatgattctcatgggttcacctctctttggatccgggattacttcttgttgggccaaaatttcacttaagctaatgggcttaattaaaataaagtgtttgaaaataaatgggcttaagacatgacttagctcacgttggagctctggtggttgtcggatcgggtcttgaaaggaggaaacaaagtcgctaatgctatgttcttcacgtcctggagaatagttcttcttcgcttcctcaactccatgagaataggagttgttgaaatatcaagtcacccactacctcctatatttttgttggacttggttttgattttatgaacaaacaaattaaaatctaatctcaaacctatataacgaggttacgcttcacagatagagtaacacttaaacgttcacacatatataaaaataaatcttctccaacaatttctctatgtcttaaattaaatctcgagagtatcgtaaaaactatgttcctttgagtggtaagaaaccagtttatagaggttgtatcatgggatccttgaatcacataaaaactgtcacactacgggtgattcaaaagttaaggaaagagttcatcaactcgacttctctcatatctttccttaaaaaatttatgatttcgatttcaattatttttacgttttgctaattttagctcacacttctcaaccgctccaccacc

SEQ ID NO: 28508 - DNA, 604 bp, Arabidopsis thaliana columbia
tagtaacgtccgccagtgtgctctaaagcaaaagataaactatgcgaaacgctggtatattgcgatggtatagttctgctctgggataaacggacaatttacggaatccctctttctcaagccgcttgtttctgatccttgaaaagttgtatcaacttgttctgcatgtcacagaatatattgatagcctggagttataagtatcggtattggcctcatcgcctagaatggatcgaacatacctgtatgagctttttttttttgcccgtcccattctccgaacggctgaacgctatccgatatccagcttcgtcattgacataagagattattttgggacttggactcggcggttcagagtcgaacaaagacgcgggtaaaggggtaacgaaagctgctgcaacagactaagagctatcgtgatatgatgagcgccacgtagggcaaagatttcgtcggtagacgtcaaacttgcgggcaggacttgtgttctaacgccaatgggctcgtagtagttctgggccgagacacagaggggcagcaatttctgcgggtccacgaatctaacaaacgcaatattaatcaagcttaaccgtggtggatg

SEQ ID NO: 28509 - DNA, 526 bp, Arabidopsis thaliana columbia
tttcgtggttgttttttagggtttccctaaacatgtatttatagggcttcattaggtcaaagggtagaaacgtccttccattgattagtaagtgatgggccaagtttttgggcttcttgctgcaacttggcggcaagaggaagggaaggtgtggtcgtgcgtcctagtagtcggtgaaagtctcgaggggacgcgcgggttcaagtcaccttggtcggcggttttaaattgatcatttttaaaaccgcgattctaggacatgttttcactctttggaccataacttctgaccgtcttcatggattgtttcgattcgacttcgacgttaattttgactcttctagctttccaatgacaccgagataccctcatgccgcgacctgtaagaccttggctggatgtaaaacatctaaggcacaaaaactgttctgaaacggatttttgttgacgtctactcatttttgcatgaaaactcataattcttccttgaagcggaaatacttgaaatataccttgaaagtgcaga

SEQ ID NO: 28510 - DNA, 637 bp, Arabidopsis thaliana columbia
tctagagctgcacgtcatgaaatttttatagaattgttcataatgcttataagttataagtaaatctgaaaaattgatcattatatagaaaattatatatcaatatatatatatggtgataatagtctagttagaaaaaaaaaactatatcatattcaaaatagttatatcatgaataacaataagaaaattctgaaaatctcaattaagtaatccgtttatataggaagtttcaaatccaccaaacgcagataaacacaaaacacagaaataaattttataatagtaaaaaccgacaaaaatgctagtaatccaaattagtctatatacagagagataacacacttatacagagaagctcttacaaattgtgactctcaccagaaaaacacacaccaaacaaaacaaaacaaaaaacagagagatggaaaacggaaactcctccagcgacaacaaatcttcacataaaccgatccgatgcaaaggttagtgaagagagaagcttcccaaaactcattaagtatcttatcgtagttgactatatatgactactggcgttgactttatgtttctatgggcagcggcggttagtaggaaggctggagagctgttggtgatggaagaaatcatggtggcg

SEQ ID NO: 28511 - DNA, 616 bp, Arabidopsis thaliana columbia
atctaagatgcataagaaactaaaatacagagtaaaattaaacacataattataaaacttgaacaagagaggacgagaaaggagaaacacctactgacgattgatttgtaaaggaagctgatagaggaggtttagctctttgtcgtgaatcatttacttgatttagggtttccagttttccaatttggggtttatatacgctttaagatgagaagaggatgaatcgatgattagagaagtggatgtaaaaaaaataaaagaggaacgagagattataggaaaccagagatgtggtttcgatatttttgggttttgaatatatgttttacaggatcataactgcatataaccttacataaaccttaataccttatatatgtatgtgtatatttaatatggccggttaatagatcgggtttcggtttatcccaaatcgaaaacgaaaccgaaaccgatgcgatgtaatttcattacccatttggtttatagtctctaaccgaaacctgaaccaaacccccctttttcggatcgggtcgagtcgggttttcaggttttggagaatatgtcgaggcctagtcattgggcagttagaggtaatggggtgaagatagaagat

SEQ ID NO: 28512 - DNA, 530 bp, Arabidopsis thaliana columbia
taacggccgccagtgtgcagaagaactttgaaagattagaaaaccttgtttacgactaattaagctctgtacttgagagtcaattgcacaagtaaccaaaatcgtttccctcgggagaactggacaaaggaaacacgacaatattacatggtttaaaggtcttccattaccagaaaaggaaaagaagcaggcagcgatggaagagtgattagagtaacgctccagagtcaaaatgaacatttgcttattaggagacagataaaaacttgactttctcatttcaacggacacactttctcaaaagcttcttgctctttccgacacaactcaaactcgttggtgtagtaatacatgcatccaacgtaagcatccatctcctttgggcatctctggtgaagatccttcagcctgcaatatcaatcatttcaccagttttaagaacaatctaagtcaccaactgcaaactactcaacttcagattgttatggacaatgcatcatcctccgcaaagttagtgaactctcaagata

SEQ ID NO: 28513 - DNA, 454 bp, Arabidopsis thaliana columbia
cttatgagtaaaaaaaaaagctgatctagagaattttgaacatcccatactaggctgattgatctagtgaggccttcttagtctcctctatatcagactcggtttgacgggtttcgccggattcttttgtggaaccaaacgaactatcaggaagagtattctccagactcttctcttgcctagagaaatgataaataaactatttgttagaactaaagtggcatatttcagtagcaagaagaatttaagaagctttgattcttatcactcattttacccttgatgttcttcgttgctggtttctacttgttcaagatctttctcacctgtaccactaccgcctgaccaaaggtaaacaaagagagacaagaatgaataaacaccaagaaaaacaaagcttgaatgtagagagcacgataacaaccctccctgacttgagatgggaaatgagcgt

SEQ ID NO: 28514 - DNA, 582 bp, Arabidopsis thaliana columbia
tattcttattcatatgtgttattcgggatttactaaggtgtatttaaatactgaatttcacataaatttatttctcaataatatctagcttttgctgataaatctacgtaacataatggtatgtaaaaaaaaagtagattataaatttaatatatgtgtacataataaacagtaagagatttgatcaaattatatcttttcatgctatttagtattgtaattttctgaaataatcaattatcctaaaacaagttcataaataaaaagttaatatcctaaacaatatttacgtttaatatattttctctattaatactagatttgatggaaattttatgtattttagttattttatataaaaagtttttttggtttataataatgaaaaacgtgattaatgataaaatcataataagagcgaagggcccattataacagcatttatttgggccgttgttggctcaggtcccgctcttttttacgatcgaggcgccaaaccaaagaatcgattatatgttgtcacttcagatggcaatcaaagagacgacagatctattgcgcgagagagagagagagagcgta

SEQ ID NO: 28515 - DNA, 585 bp, Arabidopsis thaliana columbia
taattgatattttcgatgtcacaatgaaataatttgacattgtagctaactagttttatggtccttatctatctacaattgtatgaagtttcttcattttgcttgtaaatttcagctgagttccatgatggatgtgggcagtgaagtccaagttcgtgttagtggtggtcttcttgctatattagaaagcgaacgaattgtagaaaccctggaacaaaacgaatctgggagtgcatcaatcgcaattgattcagtcatggaagtaccattgtatcctttactttttctgttctgtttcttatgtcttgatgatctatactttcctgaattattgggatgataatgctgcatgcaaatcctttacaaaatttataacaggaacaagtttcttaaacttgatgctgctgctcacgaggctctgcagatatttcagacagataaacatccaagccatatgggcattggccgggccaaagaagggtaaatgactaaatgccttagttaatctgtgtaatcatatacaccttttcctactttgacttgtaatcttcctgaaactttgaaatgaagggctcggtatttgga

SEQ ID NO: 28516 - DNA, 490 bp, Arabidopsis thaliana columbia
tattgttaaggacttttttagggacaggtctcaaaagtcttgtgtcttaacttaattttgttttttctttgctacaaatttattaaattactattttaattttgtggacaaaattctgcacaactatttattgcagctcacaagttaataaacgtaacagtttgactgtaattctatattcacaattgtttttcaagattttaaagtatatgtagacagtatattacaatacaaatctatatttatgtacatattagtgggaaacaacgattttattagttgaaacaaagtcaagaaaagtttgtagttttagtcaaaactttttccaaaggcttttcgtttttacttttataaaaataatcgcattaagaaaacattggacaaaatttgcttgtctttctctattgaaaatacctacttctgtccttttaagcacaaatacaacatacaaatatatgacatttgataacgattaatagttctgttgaaa

SEQ ID NO: 28517 - DNA, 481 bp, Arabidopsis thaliana columbia
ctttaaagtgaagtaagagttactaaatcatttggaacccactttttttttttaacatttagtattcttctagaatttctgttctattgatatctaaatatttgatgataatttaaaatatatatagtattttgagaattttataataatttaccgaccatctctaccactagcaaataaatgctttaagaataataattttgaaatattgtggatgagaaattttagtttaaataatactttgttgtcaaatgataattgcttgaataagacaaacacatattgacgtgttttgtcaacatactgaaagtgaaatgatggcgtatttagcattcaattattttatgaataaataatttaatagaagcacctagcatgtatatattttcatatatagtacaatagtaatgtgataatttcttgaaaagctagtcaaatattaacgacgcatttgttaggttttgtttgaaaaagaaagtgg

SEQ ID NO: 28518 - DNA, 534 bp, Arabidopsis thaliana columbia
ggtatgaacaaagagccaagtcccatgaacactaaccgttttgatgaggtaaaaggaagagcagtgagattacctccaacctttgtggattatgttgggaatggacgtccttaagtttgttggttggctttctggattttccattagtcggattgatttgaatctacagtacttaagcaatccagacaataaactcgagagatagatcataatttcagacaaaagttttgacttaataaaacaactatctaagtaagaatgacacaactgactcataagaaaagaaaagatgaatttagtaactgactcccccaaactaaaataacattgtcctcaaagttattaagctagggaatcgaaagaaaaatagtcaaaagttaaaagttagagaaacgtgagttgccacctgagagtgttgtcgatcgataccacggtggtgtcgatcgacactctggtcgtttgcacagctttgcgaattcagctcaatgttgtagagcttgggttagtgtttcaaatggatctccagttagactg

SEQ ID NO: 28519 - DNA, 851 bp, Arabidopsis thaliana columbia
ccctctgaatatagaaagtgaataaataaataaggaaactaaatatgtattatagattacgtttcaattgtaatttatttagtttttattatgatttaaagattgtagtttaaatattttcgtctaaaccctagcagctcgtttttccttcttcttccctattcaacaatatttgtagtcatcttcattttatttgtctccaaaatttactatatttttcctttcttcttctattctacgatttgtgcatatggttaatcgatgcacatctacgtaaggagtggtgtgtggagattgtatgaataatatgttctcaagaacttgtatctagtcgatctaacaacttctaagcacaattcatgttgtatgcatgaacaatgaaaaccaatataacacattatcttgaaacagtaaccgaaccttgttctagtcactacaagaaaacaggcgatcactgactacagaggtagtcgctcagtagtcgtaaaacaaaatatcatactagaaggcaactaaactccgtagtcgttaatacatattcgctaagttgtgtagtcgtatattagtcgtcattttacgacaaatatacgactactatacaagcagtatataatagtcgtggtatagttgtataattgggcgactatttagcgactaggttacgtaaatgaatattgtatgtgggtatgattcttgtagtcgtatcatagtcactaaaacatttacgactatgtgacgattattgaacgacttatggccattgtgagttaatagtcggtaatttgggtgactatttgacgttaattttatgactgttttacgactgtttttagtactaatttgcgactacg

SEQ ID NO: 28520 - DNA, 581 bp, Arabidopsis thaliana columbia
taataaagccaagacaaaagcagcaaagtttgatcatcaattcccatttctggttttccctttcgctcctcattacttcttcattcagttctttcaccatcacctataacgcttctagcttgactgcaacctcagacttggctgcgtttatctcactgtccatggtggacaatttcggccaactgtctacaaccactttgtatgtaccatcttcgacccatttaaacaaatggtcctgcgttttcaatcacaaaccaattaacaacgaaaccaataaaacccaaaatcaattatacttacatcttcacgcgtaggacaacagaagtatggttctttgctgacgtcgatgtatagatgaccacgtctaatccgcaatgatacttcgatggtaacccacgtccctaacggctaacggattgcatactcaaaatcgagttctcggaattgctactcatttctttaattatagatgggaaatttggagacgaaaagcaagaaggaatgcatctccagatctaaaataagaaattggaattttataacttagggtttagttttggggatttataagttggcgcgtg

SEQ ID NO: 28521 - DNA, 359 bp, Arabidopsis thaliana columbia
  unsure (1)..(359): unsure at all n locations
aaaccaagcaaatcaagaaccacgtcagcaggcccacaactcccaaaccgacgcacatatctccacccaaagcacaacttcaggcactcgatgaccgaaacagctaagcggaacccaacaaagaggagctcaaacacaacgacaaacccagcacagagggccagagagtgaggcgaaacccttntcgcagctccaactccgcacccaaagtcaatctccagccgagcaccaaagaacccctcaccaacagagaccacacgtccagaaggacgttccttcatcacaacatccattcctagcaacacatcacgcggaacaaaagcggaacgtccatccacgcaggcttgcaagtcaagcaa

SEQ ID NO: 28522 - DNA, 534 bp, Arabidopsis thaliana columbia
ttattattatcaattgacgttttgttgatcactttgggccttgggctgccaaggaaagttatggatattttgataacatctgaggtaccatgtttaaaaattaaaatgaccgaacctgatgcaatcgaaccggttaattaaacagaaccggaatcgttaaggaaataacccaaaatctctgaaacacacgccacgagaacaattacttccaacggagaatggcctcaattgtcggaattcgaacaagattcctgagtttcgggaagctttcacaaatctcttcttcactgttgagaatacacaatcctcgtaatcatcagaatcctcttattctccctcttccttgtttctctgccgctcctagtcgtcatcgtcctctgatttggcttcgctcatctccgcctgtgtcctcgatgaccactcaggctgaatctgggtcttcccagcaatccgattcttccaaaacggtattatattcgttgaagttgtggctaaagttgagattttttatctggtatgattgggtattgagag

SEQ ID NO: 28523 - DNA, 432 bp, Arabidopsis thaliana columbia
ttgaagactgtaatccaatcgacaatacaaaaatacccgtgactccaatttgtcgaattataaatggtctaatttcactaaagactcttataaaatctatactaaacacaagcagcaaactttagtttggtgagataatataaaatgtcaaagacagacaaaagcaaaaatcatcataaagcacccagaaacataatgaagcaaaactaaatgaagttaattaacactaaaacagagagatccaagagtataacatccataagaaaagccaatgatgataatgacattctaacttcaccaaagttgaaaatgatcaaaagctaaatatggaagcaatttactttaatcagaacaattaaagttacttactaaaactggaaatattaacatctgaaaattaggttttaacttacccctgtaaccttacgaatt

SEQ ID NO: 28524 - DNA, 610 bp, Arabidopsis thaliana columbia
ccaaggagtaaatcaaatcacagccataagaagagaaaaagaaaacggaagctattaaatacctctggccggagaaaattaacggaggcttttctttctttctttgagagagagagaaaagtaaagagagactcctcgtaaagagtttcgtatgaaacggtgaagatggatgcgcgtgcgtgaatgtgagattgtccgggtggtcatggttgggtttttataggcgtcgagagcacaagatatgtcttttcaaacatgaccattataccccttcttacatcttttttgtaataagtccacccctctctctactttcctttcccaatttaaaccacatttgtctttttgactttcttttgctctttcctttatttgtttttcgttttaaacggcttccaaagttttttttgccaacacttatacgtgtccttggcagaaaaatacaaataactggatatcattctttttttttccttcaatagagatgattactcatattttgtttctctgtaaaaaccaaataaattgtaatgttaacttttggctttttcaggtttatattctttctaaatttttaacaaaattttcggatttcttatgccaaagatat

SEQ ID NO: 28525 - DNA, 529 bp, Arabidopsis thaliana columbia
gtgatcacatatatagatgacaccgctttattagccttcaagagccaaaatattactagaaaaacaaagtcccttaaaccaaatataatctattcagacgctatgcatagagtttcagaaaggccaatccatcaagaaagtctcaggccttactgtaatagtaatttagaactctgtaccagtctattagttacagaaagacataatggcttgtcctaccagtctatagttggagcctttgcagatggaaaaccatactacccaacttagaataggaggtgagttctctgttacacagcaagcaatttgtagtccccattgcattatatacaatttttgaaaccatgaatgactttcttctgttttcattttatgcaattgttgaacgtttcttttaaagtccggtaaagtgaaaagacgatgaaatttctttgatgaacacattcattgttcccttttggtgttaagctggtaaagcgttggaggtgtccctaaaacatgccagattgtacagaccatctcgatgttg

SEQ ID NO: 28526 - DNA, 610 bp, Arabidopsis thaliana columbia
aacggccgatgccctcgtgtcgaccgtttgctgaccgcctgtctgttgttgttgagattctgaacgtctagcaaaaaagaagtggtgtgcaaccatgtaaagcactagaaatctttgtgaatgcaaatagaaggatgtctcttgatctgatggatgtgactaaaaaatgatgtaattaaattgactaattagaggtaagcatttattttagttggtacaacgtgtgtaaaatatggtccacatttctcctttttttttttttctttttttctttttactactttttctatttgtttttcaaacaaagtgctctaaactgacaaaactggagaaatagtaggctgtatttgattttgtgaaccaaccaaaaaacctttgtatttgatttataatattgtgtgttttaaacataaagaaaaagatatgagataaggaatctcatggtcagaagtcaaaactagaaagtcataaaataaaccactcctaagaatctgataagtaaacaaactatatatttgcacactaaacgtaatttagtggcgaaaaatatgcatgggttataatcatcttatgacgttggaaaaaaaacaagaataaatcatataataat

SEQ ID NO: 28527 - DNA, 464 bp, Arabidopsis thaliana columbia
tgcgcatattaacatatgcatcgttccggtgtgtcacatcctctttacgtggtgtagggtttctacttttacctcttcgacacgtactccgtcctcttcccaattatcttctctctcttttcgtttccgtgagattttgaatttcttccaacaccaaaaaggcccactcgtttatagagattttaaaatctttatcaacaaactgaaaattcccggtgatgttctcaaagatcacctcgcgtatccgagttaattggtttgctttaaaagccaagaaaacatatacatacttaaatattaattgaattctgaactgattccacctagacagtgacacattccggcttccttttctgtatgttcattacacaccgaaaaaaggcaagaaaaaaaggttcagatcaagaaagacccaaccatacccggtttaaccgctttcagtaaaccggggttttttttttaga

SEQ ID NO: 28528 - DNA, 428 bp, Arabidopsis thaliana columbia
gtgaatgtagctgctgtttcattcgagcaatcagggtatattattatatataaaaaaaaaaaggttaacatgttgtagttttaaaatttttttattggaatttagttggattcatatttgatgggggtcaataattttttggggaaagggtcaatttataaaaattaacaaaatttaaactacttttctaaaatccatgggggtcaatagaccccatgattacataatacctccgccactgtgcatgatgaacaaaattacctataaaaatgagtcggctcaacccatgaactcatttaaacctgaagtcattggatatgagttgagttgtgttgagttatcatttttgacacccctagaaaaaccaataggtttttaccaaatcttgcgttattacgaaaatgataataaatgttttatgctttgat

SEQ ID NO: 28529 - DNA, 563 bp, Arabidopsis thaliana columbia
tatccgaatctaaaataacccgaaccaaatccgctccaaaatccgaaattttcattattaatgcttgcaacacccaaaatcactcctagataaacttacttgagcctagttgaaggcctataggctatatgagatgatcattttgccctgtggcctcttaaactttaatgtcaattatttacaaaaggaaagtaaagtgatcctgaaaactatcaattaaaaagtgaagtatgtgtacatcatataggttcgtgtcaagcattacagacataatgattgtaagtttagatagtactttatcaaactccagctgttagagacgtggatgacttaaaaaacatatagacgagtgatctataacgcgtctttctataacaccaaatgtatttttttcttttctttaggaccaaaagttattacaacttgattagaaaaacaacaatatgtttaacacttttgctttctttgattgaagaatcaaacaaggaaaaaaaaatcaactttacctctaaccaaaacctattctaggtatagaaagcaaaacctaaactagattttttttg

SEQ ID NO: 28530 - DNA, 396 bp, Arabidopsis thaliana columbia
  unsure (1)..(396): unsure at all n locations
nnnnnnnnnnnnnnnnnnnttgaacttcctatttgtttagtttttaaagcgctaacttttaaatatgggacgaaaaatataaactttcgaaatatcataaaattcagtttgatcttccgataaaatggcgaaatttcgttgaattggccatttcggacatgatgttaagttttgttaaccagacgatcaaatgattaattttccgttataagtttccgctaattgaaattcacaattaaaatttgaaaaagaaaaggaaaaatgtttcacacgaatacaggccgattcatgacaaacactgtaggcccattaaagcgagcgccattatcagtatatatactgcggcgtcgatataatatcctcattcagaattaagaaaccctagacgacgatatc

SEQ ID NO: 28531 - DNA, 1107 bp, Arabidopsis thaliana columbia
tgcttaaaatagacgactatgtaatatttaattggtgatagtaatataattagacttctaaacaaacaaaaaaaaaaatatatagaagattgatttaattgtatttaaaattttagagagcgtttatgaattataaaaggggaaataattttaaaatatatagttatatatataaaaatccccccccccctaagaaagaaaatataaacgttatgagaaagaaaaaagagcaaatgatagtggcatataccaactggtaaaacttctaagaggattgtttgttaaaagtctcacatcgaatatgagactgagccctagtccaaaaattactaaaatggtcaaaatgatttgttcaaaaagggggtatggaacctcactaaaataatagtggttgcattttagtaagtgaggttagactaatggttgaattttagtaagccaaaaactttccatcagtaattgctaattggatcaactaaatgccatcacacaaagaaactattgctgaaattgaatattgatattatcaaattttggtatatctccaacaaccatagtcctcaacaaacatagagtaagtctagttcctaaattttcaatatctagctgtttttttcttttcaatatccaacttagtaaacacattgttcagaaacacgccaaaaaaaaaaatcaacacatctcaaaccatcattatccagaagggtacagtaaatccagttcctagttttcgatttctaacttcaaaaatgctctctttctacatacacttttttacaagtctctatcacagaatcggaacatgtggatagagcaatggctagtagactcttttccccgaccactctctgacgttccgcgataaatccgaagctcatgatcaatgaacacgacgagtcatttatacaaaggcaactactaaatgtggtttcttctcagtttgcctccttgaaaatttagctgttatatactaaaaggccctttgtaaggctaacaggccaagcctttgggcccattaacatcaccgtttattcgaaacgtatgttgttcagacttgagagcagtttgacggtgacacaaggacaatatttacgtctatacagtaaa

SEQ ID NO: 28532 - DNA, 517 bp, Arabidopsis thaliana columbia
taaccgtgtatattacctacatttgttactaagagagctatcacggataacgtgtttataacacatgaaatgtttcattatctaaaatctttaaaaacaaataaaaaaatattatatgtattttgctggtaaacggtgttgtgaaccatttaccaagatcttgtaatgcaacattgtataccatcaaaatagtttttgcaaatcgatataaaccatttacaatttcaaaataataaattttaaaaagaaggttgatattagtttctgttgaacatcaaattagtgactaataaataattcttcataaaattagatgaacaattttaatcccgaatttttaaaaatcattacctaattaataaatgaatgatattattccgacaatggcaaatatgtaataatcagatttccgaaaatatttctgaccttgatatgatgatattaaaaaaaaaaacctagtgacaagacaacacatagccaaaaaaatcttttgggtatcgttttgaatttcaaagac

SEQ ID NO: 28533 - DNA, 757 bp, Arabidopsis thaliana columbia
gtgtagtgaaatcgtctgaagacgtggcacttgctgagtggttactatccgaatccttagtacacttaaacgtagcagatcatcactctctcatttgttttcccccgaaaaaaaagaagctaccgtctttttctagccgttggggctgaaattgaaccatcatcatcaccctcatcgtcttcttctcttttaccctaatttatcttcttatccccagcgaagttttctcgattttgatctgattggtatagatctccggtgaagtaatacactggagggagatgaagtcatcgagaatgaagtttgcaaagaagttgaaatcaattagagccggagaatatctgaatcaggatcgaattctccaggttctttctgctgcagatgagtttcttccaaagatatctaaccacattcctcagattacatccgccgcttctatctggagaacccctcaaaagtctgaaaatcaaattgcaaatgtaacggaacttttggaaaacgtgagacaaggagaagaagaagcttctggaaattttgtcggcgacgaggagaacgtacggcctccggtgaatcagattccgagagttccgtgtgatcggaaagagagtaaactggcagtttcatgcggatctgatacaggaatcggaagaaagagtttcggatctggatttagaagacctgatttgaattcgaccacacttttcgatccgaaactgttagaagcatttgaattagctgcgttatgctttaggaagat

SEQ ID NO: 28534 - DNA, 525 bp, Arabidopsis thaliana columbia
gaatcagaactacgaagattaatttgaaccaaaataatttattttaatatagtatattatatattgtatattatcaaagtttattacaagtacgataggatcttatattacaagtacccacactcttatattaacaactaccatataatctctgaaaacagatataccacatatcacagttgtttttttgttttttttgggccaaagtatcatagttgtttagaaaattatttgtaacaagaaataccaaatgggatactattccatgtcacctttaaatatttcaggaaagccatattttcaaagagtgagtcgacaagttttggaaaaaaattcttaagtaaaaggtgcaactgttgaatgtttagggtgaaaagtcaaattacaattcctaattagcgtaattgaaatggcagagtaaactttttttcttctcttcgttttgcatgtgatcctagatttccttttttcttaatggtatcggttttctttaaacattgtttgtgacattacttattttatgca

SEQ ID NO: 28535 - DNA, 465 bp, Arabidopsis thaliana columbia
tacaaagaatgaggctacaccatcaattctagttttggagttgtaaagaagtaatcgggtctaagtcccttggaatgttttttagtccttgttcttttgatgcatacttggcactcttaagggttttccctttttaaaagggaaacacatacaaatcatgtaatcaattcttaagagaacacaacctttgaccaatataatgtgcataaaaatctgatttataatagaatttccattatgatgagctttctcattcactctattgcagcatttattgagcgatcaaagataataacgaccagtttgaacgtaccgaagccgtatctctcaaacaccctattgttgtctatgcgcaaatatgagtatgcatgggccgaaacacaatctttgaccaacgcattaaatcattataattattatcattattttagatagcattaaatcattactgttatctactttatc

SEQ ID NO: 28536 - DNA, 537 bp, Arabidopsis thaliana columbia
tcagaaagagaaatcgagattggataacaaaatggtaaatggttaatgaaagtcgtacaaaatatttcaggcttccgaagaagtgagagatcgtgtacacagaaaagcacatctcgcagaggaataaataagaactcaccggagatagagagaggagagctatttcacggcgacggtgacggccacagagaatggaaaaccctctctcaacgtttctccgagaataacaggtttacggagacggaaacttttagggcccaatactagctctgttagtattgatactattattgggccaggtttcattttctcttttaaggcctaataagacccaacacttgcaaattattggaagacgaatgctgtttttgttttgtttttcaataaaacaacatctttcaattaaattgggagcaatccacgtcatcgatccgtcaagtattgttaacgatgtataaccattggatcagtaatcaacggttgatatgaaaaatcacacggatcgacgcagttttatatattaagacattagttagc

SEQ ID NO: 28537 - DNA, 578 bp, Arabidopsis thaliana columbia
attgtacgaaaagaaacaaaatcataacaataatagtttaacctaaaccctgatatttggctctaccgtgtcctagcctctcctctttgtataaatagccgttactctttttcacatgattttcactaccaacaacacttagagaacaagcagaggaatataactttttttttctttttcctttttgcttttttacaaccaaaaaaataaagcaagccgtagagagcaagagacggtgtaaagatgcactacacacgcatctcgccggctttagtaccatctctatcaccaaccgccgcggctgaatctagcggtggtgggacgatgatagctactgttttcatggcccttctcctcccctgcgtcggcatgtgcatcgtcttcctaatctatctattcctcttgtggtgctcacacggcgtcgtatcgaacgccttcgatttgctgaaccggttaaacggtcacaggtaaaggcctttcggtgttggagctcgagaaaatcctaaactcaccggaagagagctagccgtaatagctagattcacggatgtgctgtttgccttgaagatatagagagt

SEQ ID NO: 28538 - DNA, 819 bp, Arabidopsis thaliana columbia
tcatgcctgcacgccagatgatccccattggatttatgttagtacatagtttcatttaaaataatattcgattccatttttcttttgtgcttattagattcgaaaaatttgattcgttataatattcaaatattactacaagaaaactatcaataataggactaactatataagaggctcttaagtaatcaaaaagtatggtcgacattcgtataatgctaaattctagtatatctagtgaaatcaaaagttttggctaagatgcatctttaccaaaattcggttgattgacttgctctgccaagtacaaacaaccacgagacacgacttgatttatgactgatcgagcaacatcgtaccgggacggcgggccgattagtccatatatatatggattatttaagaggatgagaaaataatgaacatttctaagttctaacacaaaataatattggaagaaatactaatcaatgcacatgtcttcgacaaacaaggaaaacaacaaaaattgttacgtgaatttgacaatataaatattgttcttgtacgaccatgattgcacttcggcatgctagtgaaatacgtctattataagtttgaataattacaacaatttcaccgtttataataaggtgcaagttggcaataatctaaggtatataataatagcaaacaatcgagaaagtgagtatacactcaccggtgtcaaatttaaattatcttatattcttgatgttaatttaacataacaatttttttttgttgacccttttacagttttcttctgcatgttgacagactaaaaaacatctatcttct

SEQ ID NO: 28539 - DNA, 438 bp, Arabidopsis thaliana columbia
agagtgagtagacatgatgatagaagcggatgaaaacttacacattgaggatgcatggaaagctatagaagaatgtatcgaattcaacatgtttttataatgctgctaggtttgtgttgtaaattctataaacataaaactttccttcttccccatacagactagacgaatcagtttcgactaagatactcactcactcacctatgcatttaggcatatagaatcacacactttgattattctctttagacctaactacacacacatctactcaatcacacaactatttcatatttcctggaaccataatattccttacatcaacatcatttcatactaaaaagcaatcagtctagttggactaataccggtaagcataacaaataaagaggatatagtgaaatgtgaaggttaagaagaatatgtaaagatgtaaca

SEQ ID NO: 28540 - DNA, 439 bp, Arabidopsis thaliana columbia
aattctcgcttttttgtttttgtttttctattaccttcttcatggcttcgtcttcttttttttcttttctttttccacaacttcgtcttcttttatcttgtactttaactacaacaaatcttctttatcttcgaggaacgtgaagatgagaacggtccccacatgcagccacgtggatttaccgattagtctgtatttttctcttgtaatacttttacgtagatattataaaaatattttcagcttcagaacttttatggataggccaataattattattgtcggcttcgtatcataaatcactaatttataagccaaacaaaactctactatagaaagaacgttcataggactatcataagaagaagtggatttgttgcttttggactagcatcattcttaaggtttatgttagcttgctaatgttcttagatttgga

SEQ ID NO: 28541 - DNA, 544 bp, Arabidopsis thaliana columbia
tataaatatttacccaacattttagtgggaaaatgtgcagtgagctctgtagaaaagtcaagaaccgtgtgaggtcctttcttctcgcatctctggcaattgtgctcttcttttgctattaagttcttcatccttcttcttggtagggatctataaaacagtagtgaaaataaaataatcagcaaataaaggcaggaggaaacataaaggatattactgagataaagggggaagtataaaagattacaagaacaaaacctgaaaaattgttccaaagctgcttcccttgttgtacagctttccaggccttgcggctctcaggctcattagatctctagggtatcctccccatgggtcaagcaacctactttccacaaacctagtttcccctgtctctctctgataagattaaggcgtctgccagtggtgaaacactgatgtaactcaaattgcttacatggtaatacataactcctactctcaactgccttctccgttccatgtgtagaatgagttagttctctttaaattccctgatgtcaaa

SEQ ID NO: 28542 - DNA, 794 bp, Arabidopsis thaliana columbia
taattatatatttaatatatatagttctatagatagtatgtccaggtttagtatattttattaacatgtaaattaattatcaaatttgacaaattaataagacaaacataaattttatcaaaatcagaattatagaagaaaaacttaaaagaattattaataaaaacttaaatttaaattcaattaagttaactaacaaaaattaatttcaacaaaaatgtaattaattttatttttaaatatttaaacagatttttatattttaattatcaaacataatagatggtctaattaaatgttttaacagttatttaaataaatttagaatattcaaaccaattcgaattcaaacacattaatttgatatttataatatcatatatataaaataaagcagatttgttatatttaattaggaaatgttttttaaattatcttattggattagtagtatttaaacatataatgagttttcatttaaagatgctcccaagcgacttttccgaaacggttttcgctagctacttcggaaccctagatctccttctgccggcgatctaatcctcctttccggcgactaccttccccctcagttccgcctcctcgcctctacccccatcttgtagtctcctttgcttaccgaaggctcctcagatctgacgagtttccagatctcctcgccttttcccgatgtctcgtcgttactctcctagcgatcgcagatccaccctggatccccctttccggcctcctcgccctccgagagttaaagtcccggcttttgacaactctga

SEQ ID NO: 28543 - DNA, 302 bp, Arabidopsis thaliana columbia
atatggcggatggtctgcataatcatagagcaagccagatctggtacaggccgatcaatgaatcacatagcagatatactagggagtagcagtaggccttccaacacagaggaccaggtcaccatagagagggatcatgataacacataagtcactccagaagagaatcacgataatcacacatctcgtcggtgagtccttgcgtcgcataaagtccgaagcatgcacggagttatgtggatacgcaacaaagtatcgtgcgactcgatggctattgctgcattggtcacgctaacagagcc

SEQ ID NO: 28544 - DNA, 494 bp, Arabidopsis thaliana columbia
cctaatttactcttgtaaatgccctagctaagtagtcgtgtgttctcctagctctgtgtgagatgataaaatcatcaattctatgaacctttacatggtatcaagagcaaaacaatctttacaaagttataaacacacacaaaaaaaaacttttctcttttccttttacacgatttggacatatatataacagcatgtaatcttattcttagacatagatataacatacaaaattttcaacctgaaaagtgtatacaaaagaattacgatctttactaaattaaaagcaacaagactaaaattaagaatttctcttattagtaatttcaacatatctttttttttcttcacaaaaaaatgatcagtaaatgattcaaaaatcgattttgattttagaaaaagaaaaaaaaaacgaaaaggtaggaataaaaattcaaaaaagaatcagaaaagacaaacgatcccgcttcaaagcctcctcatctgtttttagg

SEQ ID NO: 28545 - DNA, 617 bp, Arabidopsis thaliana columbia
tcgtagtagattgatttagaggaactgatttcattgttaatagatccgttatcgatggttgtcattagcttttcatcctttaattgtgtgaaaccattatttacaacaaggagagataaatgtggaaacaaattcgtgaaaaagatgaactgcacatttgtatatatttaaattcaatgatgtccttagattaacaagcaggaaatgttaacatatatagttaatttttttttgtaaaattgttacagccgacctttggttaatgatttatattacaatttactctattttctatcggctgacttttccctgttagaaatgcagattttcaatttttgttaattattcatgtcaagaacttaatatttgaagctagtggtggttccccaaagaatttaataaacaaagtcgaagctgtttctaacacggtcttcgattcttcatgtgattttgatcaactctggaccgtcaattaagccggtctctgctgcttacttccagcctctctggtctataagaacactccctccacttctatcaaatcaaaatccacagaaatatacaacaaaacactgtttctttcaaaccacaaacaaaatgttgcgagtcttgtacta

SEQ ID NO: 28546 - DNA, 545 bp, Arabidopsis thaliana columbia
gatcgttttgtgttacctaaatttatacaatatagggtttttatccttcatcctttttgatttgaagtttcgatcgaaggattcctttatgaacacaaggtagtgaactccatttgttagaacagcttccattgagtctctgcacctatcccttttttcgcgctttgtaaactccggtttgttcgcgtaaaccaggatttggctcaggattgcccattgttaattccagggtttctctgaatttgaaagttatcacttagtaggtttccataccaaggctcaatccaattaagtccgtagcgtctaccaattccgccatatccccttttttaggatctcattatgatgtctttccttttttttcttatgccgaaacctcgggattcattacattatagatacttattttatgtctttgttatcttcttttatttttttgagctccatccatattgatttagtctaatcaacaaagattctatcatttttgtatttgcaattcaatatggttatatattacataacatatatatgttctttttttt

SEQ ID NO: 28547 - DNA, 944 bp, Arabidopsis thaliana columbia
cagattattatccacatttatctagttctgaatctttacacatgctaaaagagaactatctaaactctagagtatattttacatgaattcatgaaaacttttgttttatgggtaataaactctacagaatattttatactccgacttgttcttcttgttttccacattttcattatggtactacattcgttattacttgtaaggttacagattcgtctattgagagccataataatgtctaaaaacatatccaacgacgcatcattaattatataaaaaaaacaattacagccaaaacgaagtttcgaggctgataaattagtataagaagaaaaatgttacgaattaggttgtgatggtcccatcattaccttataagccaacatgccaccaacagctaataaaggaaggatcaattcaattctgcttttatttatctttctgtctactataattaattaatacgctccaaatatttattactcaaacacctcagattcatataattaaattaacggtaatcacttttcattaacaattgttagtaaacacaaaactacgcacagatctcaaaatcacttctcggactaataactatttttaatctacgcaactttgaattttttatttatgtatatagacaacaaccagaaaaaaaaacaaagaagcaatttcgttttttttcctttcaaatcaaagactatagtagaagtttttttttcaatgtgtaaaatcaaacccatatatcccggaaaataaaaataattaagaaaatgaaaatcgagaagagagacagagacacaaaaagaaaggggcaaaataggacattcaagtgactcatcttcttcaacgcctgcacctagtgatggtgctgcatccacggctgtaaggattcgcctgagctccacgctggcagttgtagtacgacgcacacgccgtgaaca

SEQ ID NO: 28548 - DNA, 515 bp, Arabidopsis thaliana columbia
cttaatatctctttacagtaaagaaaagctctctatttagtggataggctacttatcaacattgattccctgggaaggaggtgaagtgggataattaggaactaataattgattaggtctccaaggtggatctcgggttctatcagttctcgttttgtccagaaattctctctgttttcatatgtccatctctaatatctagtttaataaggttttccttagtatctctaagcttctgccgtttccccttactacttttaactagtgtccttaatatttcgtctttttcagtccttacatacaacacaccttaattgtagttctttagtgtttgactttgtaaatttagtatatgattgaggtgattttccaaattagcggtacagtaagaacctgaacctgtgctacaaaatttgttgatggcagagaacctttgagactagaacttgaacccattgttcagatctcttttcgtgctaatctcctagtttattgaagctaaattgattcagacg

SEQ ID NO: 28549 - DNA, 577 bp, Arabidopsis thaliana columbia
tcaagtacgtacttttgttacaacttacaaatctcttttacttcgtccgtaatctatgtacatacatatatgtatctaacgggccatggtctaatttatatgatattaaaggtaagagaagaaaaaatggacatttattttgtaaaattgtctaagtatgtaaaggcaaaagggagacattgtagggcaacgttataatccctaccaaaatttgttttgtatacattctttcacagttttaattgcatctctctcttgtccttgttggctctgtcctcattgtttatttgcccttgcctcctacatgccacatgattttgctttcacaagaacaaagaatctaggtgtcctaatgaatcaaaacatgaaatttgattggttttagtttttctacatatatatgatgttggtatatacaaatcattgataaactttctagatatatgattagttagaaagttcagtttcattggactttagtctattcgaaacattgtacctccatctttaattggaaggcgtagagaaccttgactcgaatccggtacatgctttgcacaaactagtatcaattttt

SEQ ID NO: 28550 - DNA, 958 bp, Arabidopsis thaliana columbia
agaggatccccgttgaggatattaacgattatccaggatccggtgctaacaaccgccacactcctcactgttctgattgctaattccattttcctgtaatctagcttctataaaatggtaataatcaaatcacttttatatgatatgtatcaagatttaaaaatcatggggaagtcttaataattgaatcttattctaaaaggctatgtgaaagatatcaaatatttgataagactcaaactttatgaaacccatgtctaaaaaggtgagactttttttgtaagttaatttataaaagtcccaccattaacttagctcaggttaggtcatccactgaaacactaaaaggttttgctctgctttttccccttattacactgttttaaatatgccatttttgttaatttatctttttccacattaataattgttatttttcgttttatttggtggagagacactgagacagtggaggacacaacaacctcaatcaaacatgataatatctttactattataagacaaattctcgaattaacagatacaacaaaagaagaacaattacagaaaatcaaacattatttgacatgatcaaaatgaaagacaaacgaaactctccacaacatgatcacaatttacagaaaccggaagtattatatataattgagactgtaattccgatcagttattgtcggaagaaggagaaatatccggcgcgggagatggagcatgggagataccgtcatcggcacgcatgaagtcacatctattgacgactatatgagccgcagagttacccacccatatccgtgggacgatactcatcccaaaacacatacttacttcagtctctacacaatgtcgacgctggaatacacgttagcgcaggccggattctgtagaacgagcaacacggcgaatccgagttatcaaccctataatcacacaaacatttaaa

SEQ ID NO: 28551 - DNA, 292 bp, Arabidopsis thaliana columbia
tgaatgggttgagacatcatcagctcgatcgacaaagagtcctgctagaagctctgataatcttaaatgggttcagcgatcctcacctagatcgacaaagagccctgatagaagctcgggaagagcagcggatgatgttaaggatcttaagggagctctcagtggctcgcggggaacaaagagtcagggtcatgtcacgtttcagcttcctagaacgcctgtgagatctccatccaagacacatacgttttcgccaaagcaaagtggtgcaatgatgcgctctcatgttcag

SEQ ID NO: 28552 - DNA, 489 bp, Arabidopsis thaliana columbia
gtacgagctcgatttcttttgtggagttttgggttcttctggaaaacagcttggatttaggaggtttcccatttgtttttttttataataattatttattatttcgtctcatttacgcgggcaaaagaatataaaataaaaatggaattaaaatataatagaaagaaagaaaacactggtcaccggtaaacgccggtgaggggtgtgtggcgtacggttgtgaatggatcaagacggtgccgtcctctgccgagcatttaatttttgtcccttcacttcattgcagttttttttcttctttattcccacattgtgtcgtgtctccaaacggcatttgttacaatttggtctctaattcttgaatactaacgttgacttttctttgctcaaatataaattcgggttcgttacaattcatcttttttttggtacaattccattttactaatgacgtggcaaaattaactatttccaatgattagtgtgtga

SEQ ID NO: 28553 - DNA, 520 bp, Arabidopsis thaliana columbia
tttgaatcttgaataaagataatgtgagaagaaatattcctttcattcaattgaaaaaccaaatattttaatacaagttagaacaacgtcaataaccataactaaaccaaaaggtaaatgttgttactaaacaagtaaaaaaactgagtcacaaataaactcagaaaaaggtgaagaaaagattcattatcatagatgcatcgatgagacaagtgcgccttgaagatatgaacacgaagatggaagaaatttgcttgcattcgttattaactctatcagctcctctccttgtcccttcaaaatgtatacttcttcatcaatcttcttcactaccgagctgatgcaatcagatgacagaaccttcacaatagcgcttaactctaatgcggaacctggatcatcttggctcgagcaaagaccagtcgaggagaatgtgtttggattcaaaataaagatgttgaacagaggtgatttagttgcaaatctttgccaacacgtgaaatgattctcctctttggag

SEQ ID NO: 28554 - DNA, 543 bp, Arabidopsis thaliana columbia
gatattattgcaagacgaaggaccacgcgtctttgatacctctctatctccctgcatgtattcgtcacaacataacgaaaccctcccatatatatctacgcaacaacacactatgtttgaatgcatgaaacaccagctacaggtagatctcgatcgggaaagaaaaaaagagttgtaatatcatggagatgaacagaaggagatcaagagggttcatgatagctaagctaatgcccttttgcaaagctgtgaaatctccaactccttcccaagacctttataataatgttcattacacttcttccactacgacttcctacgctcgtcaacctgatttcaacaactacgtaactgccactacgcctctccctcctaaagttagcttcctccttcaaccatgtacgtaattaacctttcttttaaatctagtttagctaattatagctatctatctttcatatatacatgtctataattagtgactggcagccttggctcctgagggtaaggatatggaaaagaagctgaacatgatggcagaga

SEQ ID NO: 28555 - DNA, 559 bp, Arabidopsis thaliana columbia
aagagacatttaagcatggaggtttcgatgttacgatctctctaaaactatctagagtatcgaatttcaaactcgaagcaacgttgtcatgagaggtatcgagtcatcaaaacttattaattattgggtttggttggtgaaaggattaattatgcgatatatttggtttcattgatgtgtttattgttttccaaacgcatttggcaatttaccataaatattgctgtattcctttcaccttcttttttgaacagactaaacttggattataagaaaggtgaactacactcaattgaaggaagaagagtttgctgcaacaagtgccgactttggccatggaatcggcaacaacatcgtccaatctagggacaaaattgaagaagaaaaagattcacttaaataagcgatatcatggagaatagctttgaactcctaattaaacataagccaccggatgtgtacgtagttcttgcactaaagtctaaacacaccccaaaaaaaaacaaaaattaaacagtccaaccgctcctaagcatagacaccaattttaagatgttga

SEQ ID NO: 28556 - DNA, 516 bp, Arabidopsis thaliana columbia
ttcctttctatttttattgagattctcacagtcactgttctgtctctgtgattttttcttcttcggacttatcttatcatttattatgttgtatttccgtgataggttgcttgcacatgcaaaggtagaatctgtaaagtcaaaagaagcagctgagcagagaaagctgaaaaagggtggttggttctcattcaactggtcagtagggtttgctgcttccttctaaatacattttcttgcttttttggctgttcagttctttttcctgtcgcagtcatgatcacaaatagaaaccatttttttttttaaaagttttgtggctaccatatccatgaaggcggacagaagctgaagatgaccctgaggtagatagtgtggctggcggatcaaaattgatggaggaaagattgactaaagatgaatggaaggccataaataagttactgagtcatcagccagatgaagagatgaatttgtattcaggaaaagacatgcagaatatgactcactttcttg

SEQ ID NO: 28557 - DNA, 410 bp, Arabidopsis thaliana columbia
ttacttgaatatacggattattctttgacaagactagttttcaacatttattctccataatgtacaaattcatccaaaaggcaaaaacttacaagaccattgaaaagataacaactaaacaaattcagaatgatattaatcagttatagagacgatcaatttttcttttgacatagatacttcttcacttatgaattatagatacaaaaactaactacatatacaatttggtgaaacattaaaaaaagattaaaattaggagaacaaagggttttaacataataatagccaatcatgcttgttgtttgccgacacatactattgcatcaatcgcgctacttgggaccaatggaacaccaaggctactatatatcacggatctcaaaaggaacctatttatcttttgaata

SEQ ID NO: 28558 - DNA, 460 bp, Arabidopsis thaliana columbia
ggtttttaaaaatttattagcatcggtatccaagtcaaatcatactattgacatgagttctcggcaaatttataagcagaagtccaatagttttagtggccaatctagcaacgatgttgtttgatattgaaacaattctgaaacttccgcgacaaattcatgagactcagatctctaaaccacccacatcgctacgtaaggtttaattatatcacaaaagttatcttttaagcttgtggaagtttttaacattgaataaaaatacgaaataccacgaaatagtcacagccgcaacacaacaacaattgaacaagaatattagtcacgaacgtgaactcatgatgtcgaataccacaacgacccctatcgtcttccacagtactactgatttgccactctcacgagctttgtcaatttcttgccgcaatcggacagagatcgagataatgctcaaaagacg

SEQ ID NO: 28559 - DNA, 290 bp, Arabidopsis thaliana columbia
tagaatattttctcaatcttactttacttatatgtagggttatatcattgatggtgagcatcaacgactacggcgagccatcggtcaacgccaaacacaatccacctgtaaggcgtcgtggatgaggtcggagagggtaaataaatataaagatagaaattataaaatatggttttggatacatttaagatctttaattttactcattttctctcagtatgtcatctctttatatactgaactataaaaaccttccatcaaataatacgttctgtatcattaataaatta

SEQ ID NO: 28560 - DNA, 197 bp, Arabidopsis thaliana columbia
tgtctttcaatttttaacaacaagaagaaaacatatttcaagttatccgccaaattaagttcatcgtatataaaagtgtctgcaatggacatactttgtaaatatcgtcacaataaaaatggaggctaacatatagatcatgtagatggtactgccacacatgaatggacgcgtgcatctctatagtcagcattcaa

SEQ ID NO: 28561 - DNA, 1022 bp, Arabidopsis thaliana columbia
gtgcctgaaattcgatgatcagctgtcctctcttttatttgcccctgtgaaagatatgaatccacaaagaattcgatatgccatcctgcggtttgaatgtctgaagctgatggtaatgtcaccatttgttcaatgagttgatattcagatcaacaatttgttctggaaagacattgcctgctttcatttgttggtaggagattggagtcaaaatatcagttgaaagttaattccttggcgcttgaagattgtgcttgagcagaggctgtttccggggaatgatcacatacaaaatcatgtgtttaattggtttgtctatgaatgtattttcagttgaatataagtcgagctctaggctcaatttagcagccagaagtgatacctttggaaggaagatatctaattggtaagcaaaaactgttaaaagcacttacatacagataaatcaatgtcctttggcccaatattagctttaacaaaggcttaaccttttgaaaactccagttaggcaataattattacgggtcaaatgacaaagaatgaaccttgtcgggctctttaaagatgggttgttgtataaaaagttgggtagttaaaagattggttatttgggctctgcactcaagtgagagagaagatagatagatctgagtagaatcttcgattcattattcgttgtcgtcgttcatctgtgagaagcggacaaaccaaagaatccaccggagctagtgatatgggtggttccagagagttccgagctgaggaacattcaaatcaattccactctatcatcgccatggccatctggcttggcgccattcacttcaacgtcgctcttgttctctgttctctcattttccttcctccttctctatctctcatgtatatacatctctctctctatctctctctgtttgctgttacaagtctcaaatttaaactctttgaaatctctgtttttctcagggtcttgggcttgtctctctgtttactttacccaatcgatcatcgtagcaaatatg

SEQ ID NO: 28562 - DNA, 1066 bp, Arabidopsis thaliana columbia
ttttaataaattaatcttaaaataatatatgtttactaaattactctgtcattaccaccaacactaatacctttttatgaaaaaaaaaaattttacaagcacacaacaagggaaactgctttataatttattccctctttttagtttttaaaagattaatcaactcttctttttttttcgagaatagcttttttgtattagtgctgattaagttaattaaaaatctaaacatatttctgaagatgtagattctgacaatagtgagctgatggatatcaaggagctgtcggaaatcaagaagttgcatcagatcacactaaacggcagagactactgatatggacgtgtgagctaacgtggcagggatgtagcggttgatgtgagaagccaagtaaagttgctgacttggcatggtgatcaaagacgaatgtcggtcgagaagatatggtgaatttccttctcgtcaaatatggaaaagggataagcttgtagattaaggaagatcctgattcttgaagatcctagagattagggtttaggagattagtataagtattctagaagttggctagagccgcctaagtactctagaatattgtcatatggttgtaaacttcaaagctagcaaaaagagcttaaaaagtgagtgttgttaattttttttctcttcacaagtatgtgataagaactagaggagagaattacgcttagattgttcttaatcgggtttaatcattcaagtagaataggtgaagtaattttcgagataatataatcctgtatgagagttgtttatcaataagaacaaaggaaaaatgtttgcttggccctttccaaacaaaataaaccaatatactaaattaagcttaagtaaatgtatattgttattttgcttttcaagctctatcgaggcaacccaaagaaaaaaatagaacaacgcaaccaacgagtactcaattaattatgaccaagcaattaaacgaatgatcaataaggcctaaaaattgggcaaaaggatttatcacacattttacggatgtcacatgtttacgtcgccgagacgagc

SEQ ID NO: 28563 - DNA, 571 bp, Arabidopsis thaliana columbia
tgttcctcgggatagctcgtttgagcatcattaattaagcagagacaaaaaaaaaataggtcactgaacttacgtggtgaatgggttaggtcgagtgggatcagataagattgccttagatttatcttgaatctgacctactttacgtaaccaagacttgttgataaatttgtcagcagaggaaacacagttttctggatcatcgacttccgcgacagcgctcttctattctttcttgtactgattgccggtgcatgcataagctgttgcttgaggctatgcccggccattagtaccgctaaaccaacaaaacctcctattatagccactggtgcaaactctcccattatggagaacctatttgaaaaatccattgatatcaaaaactttgttgaaatgctcataactaagtacagaaattcaaaccatatatattagtatctcttacttgttatatgtttgtttggcgccatcgcgacctgtggttgcaaaacgacgagagccccaaattgatttccgccggtcgcaattggctctatagagaaagacaaggaaattattgaaaaggtaa

SEQ ID NO: 28564 - DNA, 523 bp, Arabidopsis thaliana columbia
ggatcatacaaaagcgtctaaaacataatgtgggatgtaaatttcctaccattaaaatttattgaagtttggatagctatagtacgaggttgagtttcaactagccagtgatgtttaatttcctaccaaaaaagattttccggtgtttcaactaatatcaaccggcagatcaaaaggtaaagacaaaagtaatgaacttatgatattctgatgcgtagataaagtgcaacgataattgtagaagaaatgaggtgactgactaaacgtcttaaagactgacccaaaaggtgatgaatataaactatttccactgatcaaccgatcattttaatgcaaatacacaaactatcgagaagaatcgacgagctaaagaggccgggcgatgtccacttgacttctgaaaaagtgataaataactcgaaaggtcaagtggacatcaaccggtcccttgcacttgtcaattattctgaagagtttgtgttttgcattaaaaatgattggtcgatctaagtagaactacaat

SEQ ID NO: 28565 - DNA, 526 bp, Arabidopsis thaliana columbia
ccctttttcacttggggaacagaataaattttaagctgtaatctttcattgtccacttgaggaaaacgagataggaacaaaccttggaggaaaacaaggagccacatagtcataaatatctccaagttcctctccaatctagttgtggaacaccataaaaagaaagtgaaaacccagttgataaatatatatttgtgaaagataacagaagaaaacgaggttgacatcaatcattatggaacaggaacagtaatataagacggtcaggccaatttggaacttttgtatcagaacagtaacatactactagttcatcaaccatatttattaagaaccaaaaaaaaaactaattcagtcaactaaaggtgatctactgagaaacaaaaatatattagatagttgaatataatttcataaactgcagaaaagaaaaaatgaagaaaagtgtatgaaagcaagggaaacagtcgcacaaaccattctagcttcttccaaagctgcttttagatcttcaaagacaagctgt

SEQ ID NO: 28566 - DNA, 607 bp, Arabidopsis thaliana columbia
tgcattttaaattagaaaaccataagaatatcgagaagaaggaaaacgactttctagaatttgatttgaattttagttgcttcaaaaacatcgattttaattcattgttgagtagtagactgagaagctaaaatgtatgaaaatataatattttactcacaaaacctaaacctaacccctctccctctcacatactatatttatattacgtactattatgaaaacgacgttgaatcttgaatgtaatgtctatatataaacagttaatatataatttaacgtgacatgaaaaagcgtagaaaattggttacacgagttaaatataaccatttctttcggttggtggatcgaactttgcatcgaccttttactggatttgttttcttaaccactacaaagtttatgcatcgatcggctgtagatttgtgaccttagtttgaatttcggtttaaaaagttagtagctatatcaaaaatgttaaactaaaatattggtgagatattaattataggactagaacccacagtctataaatttaagagaagaaaaagaaaaagacagaagatgtcggcatcagaggaagaccggagcaagtcgtgagagttga

SEQ ID NO: 28567 - DNA, 561 bp, Arabidopsis thaliana columbia
  unsure (1)..(561): unsure at all n locations
cgccaagttgcgccaactctccggctttttaagtaatcgagcatttgggcctaaaaatatacggcccagtgttaacaaaacaggcctttttaatatccgggtcggactctattaaggccggatctggttctacggcggcgactcctcctcctgactataacaaaaacaaaacgcggtggggagggcggtagtatcagacagatcgaaaatcgcaacggttaagattccagctactgaaatctatcaacgtcgaagaagtgaacgatggggaagaaacaacacagcaaagatcggatgttcataacgaagacggagtgggcaacagaatggggaggcgctaaatccaaagagaatcgaactcctttcaagagtcttccttactattgctgcgcgtatgtttcttccacgattccactactttcaaattgggtttcaatctctcctaatttcaatctgtttgttctgattcaggcttacgtttttgccattcgaagatcctgttgtgtacaatcgacgggagtgttttcgagatnacgtgagtagtttgtntcatagtgattt

SEQ ID NO: 28568 - DNA, 509 bp, Arabidopsis thaliana columbia
acaaaaatcctacgttttttatttttgtgcctattctattttattttttgtctgaaattcgacagttataagaagcactaaccaatcaaacactttccgttatttttttggcttaatttgaaaattgagtttattgtacaaatatggtggagaggaaattgttgtcttgttaagatttttgtgcttgaaacacgtgaggtcatttgactgtgacttcgtcccgcgtggaccgcccgatacatcactttggtattggcatagatcttaacgttcccatggcatatttaaaaaacattatagagtcaaaaaccgacaattacaggattatcgttgcataaaaatgaattaaagagggggcctaactttttgtttgttttgttttgactgctacatatgggccttaactaaaatacgcaaaaatcgtacctactgaggacggaaaaacaacaataaatttgcaagttgaaacggcaggacacctggttctgcaccggcctcgaggcacaaat

SEQ ID NO: 28569 - DNA, 729 bp, Arabidopsis thaliana columbia
attgagtggggttgtcggttactgtacatgactggaactggtatgtccgaggatactgcactcaacaagaggatcatggacattcctggtgtacgtagtactctgtacccggaatctatcagaactccagaaatcaagtcggattagagaggggtcaatacataataaatggatgagatgtatcatgagtatgtgcaatgagtaataattatcaaagaaatgggtgaaaatgtaggtttgtttttgttaatggtacttttgactatgtatattaactatgtgtctttaagaataagtgagttgcctaatactaaacatgtgtgtatcgaaacagaagagaatccaaccatactgaaatattttaaactgaattcgaacaaaagttatatttgtctagtagttgagattggtaaacaaaatttttgcggtttgcatgagtgagcaaagtcaaatttccaattagtatgatattgtctcttttgatctggatttttccaacaaatttatactagtttgagttaaactgaacatgttaaaactgttataaaaacacttcgatgtgtaatttggatcaatgattgattattgattattttatgttctatttaaaacacgacaagaaaaaagacaaaaagagaaaaaaaggttgaacatttcctaaaaccacaaaaaaaaaaaactgaacagaactagaaaaactagatggccatcatgttgtatttcagattt

SEQ ID NO: 28570 - DNA, 473 bp, Arabidopsis thaliana columbia
gcaacaaccagttttctcacgttagaccaaagctgcaactgcttctgatctcaaaccacaaaccttcttttaccaaaaaaagcacacaactttctggattgttcacaacaaacaaaaagttcaattctcgaaaaagaagaaatcatcaaaagggtttctctccagggagatatgaaggagaaccccattccacttgattcttctttctgttgaagattccacttagattcggcataagcactttctttgataccacagatgtttttgtcttctccagtttgttattgacaggtttctgtttcggagctttgtaatgttgttgcggtgatgattcactgggcatcttcatctcagcttctgcgagaatccttgtcgccgcttcctctgctttcttctgatctctttctcgccatctcctgagttctccttcaaccgctttcttggcagcatcagccatagctgctttcttcagt

SEQ ID NO: 28571 - DNA, 496 bp, Arabidopsis thaliana columbia
gatattaagtgatctgctagtccacggacgatgctggccttgtcctcggtcgtcaacctcgccagatgtgagatcttatctcttcacatggtaaaacatcattaatgaatcgtgtcgggaaacaaggaaacccgaagcaataatcatacttacttaccaacaaggaacgaatcagtttcttgccgccccactcatgctcgcttgcgtaaacaacatcaaccctaacctctaccatgaactgagcgtaagtaagtgtctcctcgaacagtaaacccatgtcaacatacgactgggagtagtgagacttcacggataaacccttaccaacccgattgagaatcgtatcgttttaaacccgcgcaggtcaaacatctctgttttgcgactttttcacacttccgatggctaatcataccgcaatgttcacaaaaatccccaagattcttgtacttgaactgaacaaactgaagccatacaacctctagcaatggttacg

SEQ ID NO: 28572 - DNA, 523 bp, Arabidopsis thaliana columbia
cataaggctataagcattaatcattattaatatatgggaaattactcgaagtgtcagctttggattatcactttcttcttcttcttctttttgatttgaaatttgatttgaaggtgatttcactgatatgtaacaaatgagtattttaaaatgttaatctttagataaaaattttttttgtcacaaatataatttaatttaagtcacaaaatatcccacataccttatgatgtctattattaccctatatgtatacgtaatattaaacttttatttaccctagtgtaatggtttttgctatcatcatcgatgtgtctccactctctacctaaattcaactcgataactaagttcgtacgtaaactagaatcagttgaacttacatatacagataaagtattatcagatgacactgttctttcttaatattaatgttatgacaactccactcaaccaatatacttgtaacttaatatgaattttatgtatattcatttttttctgtttaacattaaagatgaca

SEQ ID NO: 28573 - DNA, 514 bp, Arabidopsis thaliana columbia
gcttggtttttctctccgattagacggaggaaaaagtgaaaacgaggggcttagacgagtgatgtgatagagatggaaggagttgagctagaattagaaagaagaagcaagttcttgaacagtttgatacagaagaagaaggctaaagaacagcaagatcagaaagatgagttcaatgttcgtgttagggcttcagatatgcctttgcctcaacagaacagagcctttagtttgtcgcgtgagattttgaatgctactccagggaaggctgataacaaaagactcgctcatgccctaaaaaaggttagatcttttgtatctctctcatgatttttctgtatttgggttgaattggagtcattgaagtctagtacttggattgagttttgaattttgacacagaatctaaaagtattgagctgcttttgggttctagggctacgtctcaaagtcgcatgatttttgtagaatgtggttatggtcttctctttcttgattggtttgaagatgtgat

SEQ ID NO: 28574 - DNA, 449 bp, Arabidopsis thaliana columbia
cgactctgctcaatatcgttttcgataataatctctctcatgtaagtcgcgacatttcttgtcttagatctgaaaccctaactcttgagttttgctatggagtccgtcgaaatgaacaatccgaattcgcaaagcccagactcaacttcactccgctgcaacactgacactgctccactcgcattggatcatatgagtcctcagaattcggagtctgtggctttaaacggttcttctactcctatccccgatactaatggttcatcagcaaagcctgagctcttacgtcctttgctatcggagaacggtgttagcaagacgctgagtggtaacgataaggatcagtctggttgagaggaagagactacaacgccggaggaagcgtcggactcggtgggataaatcgcctactgagctccatgaataaccctagcgccgaatgggtactg

SEQ ID NO: 28575 - DNA, 930 bp, Arabidopsis thaliana columbia
gatgcggtcgagtgtttggcactttggtaagggaattaggtgaaaagagacagaagggaagaggtcacggggcggttccactcacatccacgtagaatgagaagcctagctaaatgccaaatataaagacaaggaaccaacccacaaaaaagaaaagaaacccaacccacattgatgtggtgcttatttcttgtttattacactgagaaacaaaagctaattaatcacgagacacgacttataccatatgtgaattcaattttatgctctatttagtcatcaaataggagagaggtgttgaacatgagcaaaaactaagttagaacgaaaatatagtaaaataaaaataaaaagatatttggatatatataactttttttggactttcatgcgttttgacactttcatataacctaaaatgcgatttaatttgagcacttttctttggttaaacacatgggttacctgcggaagagcgcctatgttagtggcacgaccgtctagctctctttttggacgttggagttagactccacttctccacatggagttaattctgtttaattggcaaacggacgtggatgtggatgtggatgtagttggatacattgatggtataaaactgaaatacataattttgtgggatgcatatatttacttaggacgttaattagatgtgcacaaattttttgttcaacacatatttacataagtacattaatacatatacaatgcaatttactaaatacctaatgcactaacacgacaagtgctataccacaaaatactttgattatgttcacgagtatacatttgatatggcttttaaatgatggaaataaacgataacatattagtttaatgcgggataaaatattcactgtggatagcattatttttagttgcttgcactgctgcgtaccaaagtcg

SEQ ID NO: 28576 - DNA, 598 bp, Arabidopsis thaliana columbia
tacatgaaaaatcaatatataccatcgactaatcacaacctagtttagtaacacaagtttttagacctaagggtaagagtatatatcgtatacatatatacaaatttttaacttgcaagaaatcaagtcacatgatcacatgaagacttatcaacaaacagagggttaggattttcggagatgagaattattacaaacgaatcaatcaaaatgcaaagttgatttttctattaatcaacaaggttcacttgtgttcaagccaaattttaaacaagccaactaaatttgagacgagattttcaaatgatttataccaatcatatcattggacaatgaccgtaaattccgaaactgttgatgatctgctaccccctaaatcaaaagagaaaactgatgattccaaggatgaaaagaagcctgcaaaatctttctcattgagcaaagaccaaaaatgggtgtaactttcatatttcaggatttgatagaacataatttgttgtcattttcaggtatgaagaataggttagtatcagttcaggtttttaaacatttttagacaagtgaaaagatagtgtgtttattaccttgagagtgtatg

SEQ ID NO: 28577 - DNA, 603 bp, Arabidopsis thaliana columbia
caagattcaaactgtttgtctgagtgtttggtgatcttataagattagcaatgattttatcatttagtggtatcaattgattggaagatatagcggtaacattgtcttcagaaaaggctgaagtgatagcaaatagagacatatccttattatactagcaaacgaaccataggtatatcgttagtgtggccataattgttttaaacgtaaagatggcattcgagtagtgactaggatgaggagattaagttaacttattatggtctctagcctgaatggattaaggtattaaggttgtatcatcactctaaatcgaattcataatcgtgttcattgctatacgtataatagaaaatcatataagcattcggctcaatcacaacatattatttaaaatgtgttgcatgtatctttccaaacatataacaatcataatttgtttaaactagggagagaatgtgaggtgagtcaacgtcaattcctttacttcgtttgtttactcacgggttttaatgtgtgaggttatttttgcatctgaaaagaatatgatacaagaatgggtgattgctctatgtgcttgtgcttatgagagtagagtataga

SEQ ID NO: 28578 - DNA, 493 bp, Arabidopsis thaliana columbia
ctgtggaaaaggttgatgtgtacggagaaagcgagaagcattttgtctcgtggtctgggagatttaattgctcagcgatttcttgctttattacactgatgtatcctaaaacattcttagctctctcctgcagttccacagcatggtagccagataaaggccccaaaccaagctcaatcacattcaccagacgtcaatatagattcatgtgtgaaaacattcaccaacaaagagccagaacttgattcctgagccaaggatgacgaagtgggttcctgggacgagaagtaagaccccagacagaggacaagaactttgaaagctgaatgtatatagatagcttgtatggaggggggtaagagatcagttcgtggttgcagaagcgcctccacagtttcatacggattcttagagaactcaacgtattcacctgagacccacgcaggctgagatagtatagggtgtaagaacaagttaccgagcaatgcaggat

SEQ ID NO: 28579 - DNA, 1007 bp, Arabidopsis thaliana columbia
cacattcctaataaaatttccaataacatagccaagtaagggactaatactatcattaactttgattgtgctaacaagtagaagatttgtaccaagtttagcatttttcgggtctctggacttcacttgtgacagtgttgtcttcatttggaatccttctttgccgtcgccggaattgttagaggcgagaatagctctagctgcggagattgcggcagcggcacgatcaacgacctgcattcgctgaatccgatctctttcctcaacggaaacctcgaggatcttctgaaactcatcgctcttcttctccaagtctcctcctttctccttctcaccatcaacagctacaacattctctgcaattttttcaaaggccttctctttcttctcgcgatcaacagcgttcttccacatatcgaggtacgattcgcgtccttcatttgaaaccctaagaatcctcacaccggttctactaccccttaagctcctccggctcgtaaccggtgcggtgaaattcacagaagcggagaagtcacgttgtcgtactcgttgtccgtcgtcccaatgagaggaacccaaagctgcccctatagaaacacctaaacgcaaagccatttgtttcttcttcttcttcgcttgcaattccaattacaaggaagaatcagttttaaaaacttgtaatcaaagagaaaggcgaaacctttgtgagatcgtaggaaaattaatcacaaaggaaagatttttgttacctcaagttgagctgagtcaaatcaagatctgtcctcgaacgaaactccaaaatacacggaagaagaaaatgatgcaagcaaggaatagaatctcgaggattgtgtttaaggacacagtgagtgtgggattgtaacttgtgtactttggctctctttttttttcttatgtcggcaccaaatatctggtacttcttttttttttggcgggtggtgcaaataaatggtttatttgattgattactgtgtaaattgtacttt

SEQ ID NO: 28580 - DNA, 618 bp, Arabidopsis thaliana columbia
tttcatcgattcaaaattttgaatttctctgtgaagatctgttagttcaggggatagataaagttctccggtgggacttatttatctccgatctgaagttgtgggcaaatttgtttttgagtatatatgcattttctcgatgagacttgtgaacccaagttttttgaaatttaatgaacaggattatggatactatgctggtgggcaaggaggtggtggtcaagcagcaagaggataccagaatgctcagagaggaaacgagttctttggggaaccaactactcctcaatacggtgctcgtcctaccaaccaaaggaagaacaatgatgaatctgagtttagtcctgggctcttagatctgcattcttttgatactgagcttcttcctgaggtaattggtgttctcgttcatttctactaattagtgtgccttattaaacttatttagtgccttttctaattgccatttacatatgtgagtatgcgattcaaagttttaccttttgtttaaatgtcgctgcacttaggtaggcattcattaaattgattgcttcttggaagagtggacttgttacacagcactttttaggtcattggactatttttagtaaaagaacc

SEQ ID NO: 28581 - DNA, 578 bp, Arabidopsis thaliana columbia
gttattttttaatgttggtgtttttattagggttcaattgtgtccatggacgaaccctaaaagttgatgataagattaatggtggtcattatgatagcaagacgatgatggcattggcaaagcacaatgatatgatggttgatgacaaggcaatgcagttctcgccgccaccaccaccaccaccgccgtcacaatcgggaggtaaagatgctgaagatttcaggcctacaacgcctggccacagccctggcattggccatagtttatcccataattgatcattttcatgcaatttcacatatgtatatatgtgttgtgaacttatgattaaatattgttcgttttaatttttcttaaatttgcttcgtggaataaaatgatttatgtttttttcaagtcgtggttgagtagaacacgatgcgtacgtatattaagaacttattcgggacctagaaaatatacacattgtatatggccaaaatatactacaagaaatgcttatttataaacacagtttacatgcgagtatatatgtaaattctatatatgtttgcttaggagttaggacttactaattg

SEQ ID NO: 28582 - DNA, 470 bp, Arabidopsis thaliana columbia
tgaaggcaacggcttgtgaaaggcgtgcgtacgttggggatgttatcttcttgcaaataaaattgattattcactgtatattggacaaaaccacaactaatgtttttttattataataaaactcaactagtgggtgtagtatataggccatgaatgtctataattttaaaatagttttctggcttttggtttttattttttagttttagattattttttttcttaaaaatttgaatggtagtttgttgggtgtcctactttatttagtttttgatttttatgttaatggattatatttgcgttagaaaaaaagaaataaaaaatatgattgatgatttttgaggaaaaatcccaagtccctaaaaattacagattttagtgtttctttgaaaaatagttaaacactgaaaaactagttttttatttcttagattaataaattgttttcaatgtaaatcttgaatgactat

SEQ ID NO: 28583 - DNA, 571 bp, Arabidopsis thaliana columbia
actccagtgtactgttggaacaagaaaaacatgtcaagaaacaagattgtaaatttgtaatgaacaaactgaaccttgtgaaccaagaaacgagtcaactcaggactcaaaagcaccattaaattttcaaaattgatcaataaactccagtctaataaaaaccccaaattagatccatatgaatccattataacctctcatataggtttatacaggcctgtttaatctctaacaagactatttaataacaccttgagccattaaacaggtttcgattagctacaaataaacccaaaagcctttacaattttcagagtcagccaagattatatataaagtgctaaagaccaaactctatatccatttaaaatcaatgtaagctcattggggaggttctaatggattctacttgcttaatccttaatcagtctaattaggctttcaaaagaggccaataacagtaaatgaagagctcatgaaaagaaagcattattaccttgttcaagttccaaatcttgagcatggttttgccacatgaagaggacctcaaagagacggtccgagttgggag

SEQ ID NO: 28584 - DNA, 581 bp, Arabidopsis thaliana columbia
tgaatgtgatttacgagtcaatatcatctttcggaaaagattagacttttcgttgtatttgattgacaaagtattggaactttatgcagggagaaagaactggcctctgtgaagatcaatcctgcagatgttgagtttattgtaaacgaacttgaggttagcttctttttattagcttcttctatgcatgtgttcacaaagttctgaagtttgtcaccattgtaaatgagcagatagaaaagaatgtggcggaaagaactctaagggagcacaaaggtgatgcggttgctgcgactaggcaattgctttcacgatatcctctatgatggagcaggaccattctttacttccaaggttttttgtatgtttgagaggttgagagcaagtctcctaatatttaaccgagttaaaattgtctattgctgaaccgatctctctgagaagccctgaatacagttacaatcgattctggggtggtgttttgtggttctactgaagtttgaagtcaatcttattatcaagatataagaatgtgtcttcgtttacttggtcttggagctgtaaaaagcttgtgggataat

SEQ ID NO: 28585 - DNA, 895 bp, Arabidopsis thaliana columbia
gtgtggaatgacacgtattagaacacagtgaacacgaggcctgatgtcggtcggaaatagtggcaaacaatactgtctcaagagtcacgatcttgttctgctcatgtgacttttaccatctttccaaggttatttacgtacacgtgcgtctgtacgtatatgaaagcacatacgtagacctagctacaactcatgagactggattcaaattaagcattctaaccaataatatggtcgctaattttgcttagctagactaccagagatgttgagacttattggcaattaataacacaattttgaaaggaaaagtgtttagtagatttttctttgaatatactagtagttttacatgcatgtaccgtataaataattatattaagagaaaaagagcattagaacttgtgaatctgcgtagacacacagatgtgatacagtgcattatgaagaatatacggatttctaactatctatacgttttttagtccggctaaaagtattttaaaactattcgcttgtgaaaattaaatattgtggattagtaaagatgacattatcttttatatatatatgaagcaaataaaagttcaaatagtcatcaaaatgatttgtatacgtacatacctgatacctttacgtacacaaacaagataacgtatgtaaatacgcagggtgaaaacaacctaccaggataccactccttcatcagtcatcttcttattcttctctgatctctgaaatcttcaagaaacattgagaataaatctcatgataccatttgattataaaagtaagatctgcatacaattcctgtagaagatatatattgcatgaaacaaataagaaccgcattagtccttgaaagttgaaactgtgtggccgcattttatataag

SEQ ID NO: 28586 - DNA, 570 bp, Arabidopsis thaliana columbia
taacatgggcttatactttctatgttatgttcttaatgggtcagccttatttcctccgcgatccaaacaggctaagaccggacccacatttttgggcttccttacatgggcccgaacccgccccgaacatcccaaaacgggccaggcgcggataagaggcccgattgacatctctagtttcaaactatctaactacaaattattgtgaaaccaatcaatctatatatacatctatatatacatttttggtagactttttggccaaaaatccctatactatttactattaacattcaggtccttacaaattctatcaaaaccaaatattttatgactaaaaacttacaaatcgttaattttcattaaatagtttaatcaactctttcctaatttttcatccttaattaaatctttctttattgaactatatttgattaaggctaatttcctaaaatctctatatcgatattaaatataaatataaaagaagtcaataaagatatttgttgttatactaatttattttgactttatatataaaatccatatagttaataaaatatttgattt

SEQ ID NO: 28587 - DNA, 685 bp, Arabidopsis thaliana columbia
gcctaacacattagctaaaaacataggaaaattgggacattattggtcgagcgaccacaatattaaaactttgagatagcaaagcaaaaacattactaaatgaccattatgcaatcatattaatttattataaagtccctataaaatgaccacactggtgatcgtatccatctcggtatcagtgtgtctctttctccaaccagaatattttctttctcccatctttcctttcattaatccgattaacatcccaagaacatttatcatatatattcacttgcccgtttcattttctcgcaacatattctatagatttctttctaacattttcacatacatatctataaatactaaaatacaccataataaatctcaacaatttcaatatataaaaaaaaatggaggcagagaaagcagaggcgagttggacatacgagaatctgttccagaattgtaaatacaccgttggattgtccgccgtcgtagccttcggttactgttgtttccggtgatcgtcaaccaactgcacgggtttttcatttggttcgattggtttactttggttctaagaaaccttttcttcctttccgtcgtcgtaagcattatcatcttcctgatttacgttatctttagcaaaatccaaaccacggaaaaaaaggaaccagatctttacgatcaatatgta

SEQ ID NO: 28588 - DNA, 375 bp, Arabidopsis thaliana columbia
tctaattggtaaaatcaccgaaacctacagctttaccctgctcaacattaacacccataatctcaagaacgtgaggttttctcaatacaattgattgtgttaatcatcttctgctctatggataggagcctctcatctatcagggtaccggatcatatcgcggagtcggcgactagttctgtgagccgagtatcttcagctgttctccaatgtcctctagacaccgaagcttttgacgagtgtccacagcttctatagactgttgtgtctttcttgttgcaattactgtaatcacttagattagggttcatgtcttcgtcacgagtgcgtgcgtagaagctattgagatgtagagcattggcgatatctagagag

SEQ ID NO: 28589 - DNA, 527 bp, Arabidopsis thaliana columbia
tatcaattcctaatgttgtttgccgtttcattaaccggattcgagactcttcccgctggatttctttttttcacgtcttcttttctattttttatggatttggtattttgacatgttaagcaaccttcgttaatcagtttaaaatcggtgctttccgaaatttttagaagaaacatggaagcttaaaattttgaaattgctatttggaaaagctatcatttcataggcttagtctttgtaattcttctttacttgttgttcattggcatgaatatatgaaggattttatatttgattgtgtgtttgtttatgttgttagaaattgatcaaaatgggagaagctggtcaatccagagacggagaatctgtcacgcctcttgttgtaagtattgtggcttcctgttctcactttttagataatactttcagaaactatacttgctttatgctctcatcttaatggaattctgtttggagtcaacttaacgtgctcttggtttctatatcaacggaaacatataagttga

SEQ ID NO: 28590 - DNA, 640 bp, Arabidopsis thaliana columbia
caggccaattgtaacaacacacacaaatcatctccttatgccacagacagtacacatgctcgtagttatggtaacaaaccgaagtaaacttcctacaaacaatgtccggtaatgtttctacttcgatccaactctctgtttcttctttaaattcccaaatcttgatactcctacaaatcccattgctcccaattcctccaaccatgtaaagtatcttcttctctggatcacttactaatctagcaaacgtgatctcatcatccgccggaaaaacaccgtctccggtggctgttgtccactttccgtcgttgagatcaacgctcacgattagaaaaggctcggatctagcgaaatagagtgacccattgtaaaagactccatcttggttaaacccacgaggtaaaacttgatcaacgccgccgaattttctccatgagcggtcaccggaatcgtagagacaaacggatcttgaagaagcggcggaggacgatgaacaaagagtgaagattttgtagcctttgggggatgtccaagagagagaagctcaaagggaaaagggtaacaaggtaatttgatagatcttgaagatcttgttaagggattgaagattgaaagagaagaaacagaggaaggtgagagg

SEQ ID NO: 28591 - DNA, 525 bp, Arabidopsis thaliana columbia
tatatcttacaaatgttgatgttctactattctctgaattataattttgagattagatttgggtgattgcttcagatgttgatgattggagggaatatatagctatggatgctttagaagttgatcataggaacaaagtgaatatgcttgtagttgtcttatttgattcctggaatagagtctagttggccccttacggtaccaatgcagtccagtagttagctttgctttacgtccgatagtggatctggtatgaaggatctctgattcaatcccccaaaacgaatgggcactcgcattcaaactttggaaattattggtcaacccatgttccactcgagatcaattctctagttcagtaggagaaagtgattttaattcattgttaatcgatagtcgtttacagagaaaatgaatgagatttaagtaaaagcaagctagtctttaacaaaggacttataacgaagcccataaggcccataattagaagccggctagcgtcattttacacgaatcagagctact

SEQ ID NO: 28592 - DNA, 275 bp, Arabidopsis thaliana columbia
tgacaatcaggacaaatattaaatttgtgtcatttgtataattgagttgatgatggaggcttctatccaactgtagcagccactgacactgacttggtcaattttggcaaccatctttgaataatatgaagaccaaactacgtagagaccttaccgttaacccgatcagatacgtcttaacgaatcaatccgtcggctactctaaaggtgtctactatattttgccatatgcgcaaatgtctacgaatcttgtgaatatgaataccaacgggctt

SEQ ID NO: 28593 - DNA, 551 bp, Arabidopsis thaliana columbia
gaggaataggtttactgaaattgacgcggcgggaatgaggcgtataggtatttccggtttggcagtcacccaatacagctaatttgcgtcctcgcatgtagctcccattaagttgagtcacggtatcagctacgtcttttccgtgaacaacagctctaactgagctgaaaaatgatcaacaagatacacaagtctctagtcgttaaagagtaataattttaaataaattgaaagttgggtaacatgggagaaagaagcctcaaacctctctttgacaaaatggaggcgtatgatatttccatatggagagaaaagtttaaccaaagccctcgagatttgactcttcctaagcgaagtatcatatccttcaactcttacaataaccttactgcagtaataggatattgccggagatgataaacattattattatcaacaaatcttatttttttaagaaatcagtgtttactcgtttgcatgtgccggatacggataagcctcaacagagacattccatcctcccacgttaacttgagctgatgagttggaaa

SEQ ID NO: 28594 - DNA, 504 bp, Arabidopsis thaliana columbia
tgtgactcctgtaaatatccagttgtgtttgcctgttagatatttggcactaggaacgttgtttcaaacatgagctgatccatgatccattgccttaaagtgcagggactgagggatttgaccttgttcctccttcaactggctgcagcatgtatggaaggtacgagattggtttgctatgtctgggaatgatgcatttccgatttgggcatcctaatctggctctagaggtgagaattcattctcccgagagcttctatagctaaaaacttgttcttgacgtttagaatcgtctcttgatagaccaaattgtactttggatagtttactgggctgttggtgaggctaataataagagatgcccatttttgatgtatcttgagtgagtgaacccacactattcttcaccttagatcatacttctgtgtatatacagattttactcgtaggatgctttagaaagttgaaatttgctcatgcaagcaatgatgtgtttgaggtggg

SEQ ID NO: 28595 - DNA, 643 bp, Arabidopsis thaliana columbia
ctctagcgttgaatctcaaacttttttgctgattcaatttggtctatgtcttgtgaaatgtgaaaggtcgtttggccaagaattaagctttagataactgtcagcgtttataggcagaacagaacatgctctgaaagtataactcggtagggttttggttcaatggtttagaagctaacccggtttatagtaaaccagtcagctgactttgacgcgtttgacttttcattgctttctcgaaagggtgcaatcttgtagtagtgggcggctttgggccaatgaaagtcaagaaaagttacttaaaatgcacacatttacagatatgttaagacatgagggctttcttcttcatttaaggcatcctcacgttctagatactcgtttccttgcacataaagccatcaagaattaattttgtttttcttcagaaaatagagaaaattttcaaatttgtatatatagtgtatagaaagatatacagaccggatttttcaaatttattgtatcgataaccaaaatctttcacccttttttattattttttgtcaactaaatgaatactaacttcacccctgttttctcatagtaaattgctaatataattcaactgggaacaaatgaagcaagtatgaatatgatttga

SEQ ID NO: 28596 - DNA, 247 bp, Arabidopsis thaliana columbia
cttgcatcaagcatgcggtggagctcgagcaatccttcatggaaggtgcttataaccgtgtgttgagtgctagacaaaccgcacctgatgagacttacgtctatttcatggatctcttggcaaaaaccattaggtaaataggcttcatttgtcatgtgacccgttctcttctttagctcattgacgtgacttaaaacatcattgtttatcagtagagatggaatagctggatgcagtgcgtgagcta

SEQ ID NO: 28597 - DNA, 490 bp, Arabidopsis thaliana columbia
tatatgaaaaaggaggttatatataagtaaaaaagaaatttgataataaattaagaaaaaaaaaaacacaatttgtaactatattagaaaaaaggtaaaagttccttatcctaacaaaaaagaaattgttgatatattgaactatttatctaattctattgattgtttttttccatatatatattcccaagaaaataaaatagggatcctttcaattatatttacaattatataaaaagtttgtattaattaaccaatagacggataaaaagttgggccatagtttaacaaacaaactatctttatccaatgagaagcccaaaccggcccattttaaacatcctagtaaaacccatctcccgatcttaaaccatcggttgataccaccgacacgcgaacaagacgacgacgcagcgatgggaaaaacttcgggagcgaaacaggcgactgtggtggtcgcagcgatggcgttaggatggttaccatagag

SEQ ID NO: 28598 - DNA, 572 bp, Arabidopsis thaliana columbia
cttaaagaaagtcaaaaactgactactattataagaaaaaaagagtaagaaccgacttataaatttcagaaaatcagaagcccaaaatgtttagggtttagggtccaaaaatgcaaagcccaaacccacttgcattcttcttccacctatccacagcagcacgactctgagaaacagagagagatagagagatggaggcacttaaggtatggagtctaacggcgacgccactgaaacaattactccgtctatcctcttcttctacacgtctcgccaccacaatatatggacgaagatcctaccacttatcacctgcgctacgatgtgcctccgcagcttcttcttcttcttccagtgccacgacggctgaaacttctaaaccctccggccgcaatcgccggtctgcgtcatcttccaattccacctctgatcgtgaagctatccgctccattcgccttaaaaaggtttgatttttactttcaaaatgtgagctttacttaaatctccctttggaaatatgttgggtgctgatcaatgtttttgggtcataggttgaagaattgagaggccaa

SEQ ID NO: 28599 - DNA, 561 bp, Arabidopsis thaliana columbia
taggaaaggaccttgatattacacaagcaaaaccctaggcataaatatgaatatggaaatatgacaaaactaataaaatgcaataatgaaaactaaatattctcttgatcttctccacgacatacatgccttttctctgtctcaatccttttccacggtgctgaaatcatcggaactttcgttctcctttacaccgtcttcttcgtgactcacacgtcccggtacggacccctctttaagttccggtttgctgattttattggttagttagtagttaatgagccaattagttcaggtttatatataatagactactttcaacttttaattagtgtatgaggcaattagttacagttaagactaataaattggtcatgattcttatatgttaatggtatctcatatggatccatttaagactagtgaatttcagcccatcttagtgtgatatggaggcctgttaagggtcttctaatacagctcaacaagccttttcgtgtaacttctttatgatacgaatatgttttgaataattagcgatgtgatggattgaagaataac

SEQ ID NO: 28600 - DNA, 493 bp, Arabidopsis thaliana columbia
tgcagcaaattttgttgtactgtatatggaaggagccaagtatttaccaaggtagtaagtaatgaaccctccacgtccacgagctcacaatttcacacattctcttccttttcccgatcatccaaagccatgaatagagccggaaattccaaaaagcgaccgcctccatcaaaccgtcattttttggttccatcatgagatattgaacaaagtatcacttgtattatctgaaatgacttgtaatatctgaaatgacttgtaaaaaaagtgtaccacatcggatgttcttgttactaaacaattcagaccaacgcaaaaaatattatactattatatctgaccaaaaaggaaataaaatcatattttgttgtattgtaggttaaatgtgagagagagagagagagagagagcgcacaagagccatttgtctcggaactgagaaatcttcagaattcaaaaaagccaaggaaggcgggattcaaacattctcttc

SEQ ID NO: 28601 - DNA, 761 bp, Arabidopsis thaliana columbia
tccagaaatagatcttccatctacatcgatttccataggttctggaacttgttccacactgttcagagtcagagagcatgacttactagctgaagattgtatatgtaaccaggaatccaaagcacagagaaccttatgcagtgcccaaggagcatcttcgcagttcaccactggtaactcatgtttcataagcaaatccagcttgttccctgtagccagtagaagtttccaaagtattcagcaaaaataaacatatcaacagaaataattacctatagaagctcttatcacgaagttgacaatgctacagagggattaaattgaccgccaagttattgacaaacccaaactattaaatgtacaaaccatatgctgattatcatggtggtctactaattttctggaattctttgcatcgtgttctttaattaagacggaaaacatacagagtggtgaactcacgcaagagccagatgcgcttttttccgcaagcgtattcttcgcagaactgtttgcactctatgctgctggcgatacaatgaaagatcaggcacaaacgtatcacttttagctgggtcagtgttatgagcttcttggcctaataaaaccggtgaaatatcaattcccgccaaatgttgtacccatttataaggccttgaagttctgttctcatcaaacgtctgaccatcaccaaggatgagcttggttgactgcatggaaaaccggccatataaagagaattgagtatgcatttttaaaag

SEQ ID NO: 28602 - DNA, 621 bp, Arabidopsis thaliana columbia
tatcccttgcagatacacaagcgactaatcgatcttttgagcatacaagccgttgatgcacaagctgcagctgttggagcactctacaatctcgtggaagttaacatggattgcagattaaagctagcaagtgagagatggtaaacaaaaactatactccctctctatcgaatacaatcaaactgtttttagatcgcaacaatgacacaccattatgatctttttcagggcggttgataggttgctgaaagtgataaagactccgcatccggttccagaagtatgtaggaaagctgcaatgatccttgagaaccttgtctcggagcctcaaaacagaggattgctactcgcgtatgagaatgctttcgctgagctgctttttcaagagggtaagtattctgattcatttgctaggattttgtatgaactcactgctagatctaatagcagagttgcttcagctagaggaatctggggcatgtaaaagtcttctctagattagtgggtttgattaattgattgtgttgtaaactttaatcatttgctatgtattaaaaaagcagtgttgttgaacaaaaagtagatggattcttctctcgcatagcttcgacatgtgttttg

SEQ ID NO: 28603 - DNA, 971 bp, Arabidopsis thaliana columbia
cctttggtcacatatacttgaacattggcgaattcacatggtgttggtcttaaattcaaccaacgatatagatctgttaagcaagttaactttgaaagtataagtaccaagtggaatagtattttcccttaggacaagggatcattaagtaccatagtatgaagcaaccgtgacattggaccaaacccaaaacatcacatcgtcatctcctataaggattctatctttgaccctagataagccgtccaaccacaaaagctctagtcaatggtcttcaaattacaattctgtctgtggccaattatatcgatactttggtgattaatttacgaaaaaattgtttttgttgggtcaaatatttaattttcaaattggttattttctaacattaattttattttgccattatgcaaaacacatccccaccgaacattttttgcatgaatccgatcagcaagaagctggattttgattaattcgatacgcaaaggaaactccgaaaataaaaataaaaaaaccaaactaaatgaattaatcaattaatggtaatatacagctgacacttccacccaaccaagaaacactatatatatcacacgtaactgcagatccaaagccagctacacacaaaatttggtgcaagtagcttttttatagagttaagtaacattatgttgcttggattctagaataaccaacaatataaagaccaaaggaaaaaaaaaaagggaaactcagtttcgtatgtatgactcactaatttgatttaagctacccaaaattcaaaatgcatcttcatcaaggttaaatgaaattttttgtagaccaattgacttctactttgtacatcaataaaacgatatttcaacctcatttaattatcagtaatatgaatgctaaatactactactagtactacgtacttaccaactaaacaatattaatatacgtttgacagattaatgagtaat

SEQ ID NO: 28604 - DNA, 850 bp, Arabidopsis thaliana columbia
cattctactctaagcattataggaagtggatctttgtgtaaagaaatgatgtcattttggctgttcagaggaaaactaacaccgttattcgccaaaaaggcggagaagatgcatgtcttcctattctataatggtgtgtggatgagattggttgttttcttgtgtatgtgatggatatgtatggactaattgttaaatgcatgctgtgattctaattgccaattaatatatgtaggagaatgcaactaggatgttgattaaccttagcaatgtgatatgcagttttatttatttatctatctattgggagcacttgcattctctcatacttttttgaattttcaggtttgtttttaagagttccaccagagctacagggtgggcgcatagcaacaagtacttcaatattctctcaagaggagttgagcgcgatggttggaagtttgttcttcttgcaaggttctcgcccattccttcctatgtcataaactacgctttggcagctactgaagtccggtttgtagctgattttctgttccccacggttattggctgcctcccgatgatcctgcagaacgcatcagtcggtagcctcgctggtatggctgtggcttcagtagctggaaaacagaaaagtcaggtctggggttatgtttcccagtacttgggatactgtcaagtgttctgatttcattgaggatcaaaaagtactcagctggaattacagaggcatcatcagatacctctgctaacaactctagtttagcttcatctgaaactgcgaatcccgcttatggaaccgatggatccaagaaaagtgagtgattatacaaccatgatggtggttttg

SEQ ID NO: 28605 - DNA, 922 bp, Arabidopsis thaliana columbia
atcatttcttacacaaagatccacttcctataatgcttagagtagaatggattttcgtgaaaacttctgtatacggaggtttcagcgatagcaggacaatcaaaaccaacaaaagagtttattctacatctccaagtaaaatctcagaaatcgataacttaaactaaatcagagtgttactaatgaagcatatagtttctatgaagccatgtaaaaatccagcataaatgtgaatattgcaaatcattccctagcatatattaacaagcaaatgacaagcatctaacggttctttacatctccgtcacatacacaagacaacaaccactcttatccaaacaccattatagaatctgaagacatccatctaaatctcgcaagaaaatatcatgcatcttctccgcctttttggtgaacaacggtgttatcttaccgctgaataaccaacaatgacaccatttcttcacacaaacattcccttcctatcattcatgcttacaatttaatggatttcaataaacgttctgcaaaaggtttcaacaatggtgcactaaagaaaaatctaaaccatctccaagtaaaaccttaagcattcacaaaacacgataacataaactaaaccagagtgtattactaatgaatcatatactttctacgaagccaagataagccatgtgagaatcattgttctaaatccaaatcatttcgatcaaattcgtacattagcgacacaaactaacgatccaacagatcaatttgaatcacataacagtgcaattgagaagcagacctgccgatccagaaggagaaagaagcggcgagaactttagcagagaaaacacagagaagagcaggcaggaaccaaagagcatagaagcccagcttcaaagaagacggcgtgagggagacaaagagctaaggt

SEQ ID NO: 28606 - DNA, 528 bp, Arabidopsis thaliana columbia
taagtatattgaagctgcaaaatcagccaaggttacgcaatataatcatatagcgatcgatgcatcagaataataagttagaaagcgatatcaattgcaaaatagtatagagtagtataaaaatatgaaaacactctgaagttgaatgcaccaaaatctaaatgccattgttttgtctgccaaattgacttctatctagaagcttctagtgtgaagctctgataccacttgtaacgtccaaatcaaagcttcgagttacaagtcaattagtagaatgatttattgtttttgtttcttttacttatgaaaagactctaaagcaaagcgaaggaagagatgaggaagaaaaagatttgcccaaacggcaaacactaaattatttagattgatgttctattgttcatatgaacaataacgtctatatatatgtgaatctgattcgatagaataacctaattacttgggctttttttgggcttatattgatttatctgacaagtctgatcccggataaagatcatgatttgg

SEQ ID NO: 28607 - DNA, 888 bp, Arabidopsis thaliana columbia
gctccaagtccagagataatgggatatgattaattcagatttattattttacgctaaaattagagaacaaatctcattttattcttgacagagtcaaccaaagtttttttgtttttttactattaaacaactctaatagcatataaaaactttgattgactatatgttaattattttgagactttattttggaatctaagatataatttttttaaaaatttgtcccggacaatttttatatatatgcaaccaaatccatgaacataatttattcggagatattaatttacgctcaaattagataacaaaatctcgaatatggaaactgtaaatatatttttacctaacctttttggtaaatttggaatatctttcctgaaaaaacagtacccacaaattccaaatccaaaggatactaacggtaacggcagtaacaataacaacggtccacgaaacccaaacccatctgggtatgacgtcatcagcgcctccgctgacgtaaaaccacgtcatcttaacgataagcaacggcgctagaacgcacctgcagacgctataggacgcgtaaaacggcaccgtaacgaaccggtgcaaactcaccgctagaggcgcgtctttcccactcgcatccgcgagcgtccacgtgttctgacacgcgctcgtggcctccgcgacgactagcagcggagcagacgcaggcgccgtgagcaaccatgtaacggcaggtgaggaaaacgaaaagcacggcgaggtgatgagcggcgaaaagcgagtctccgtcggcgggagaaggaacacgtcaaggtggacgagatcagcgaggaaataagcggcgtcgaaatcgagaattgagttttgagattgggtgttgacggaggagaatcacgg

SEQ ID NO: 28608 - DNA, 1483 bp, Arabidopsis thaliana columbia
tataatcaccaatattcaatttgatattttggttatttgtttcatatagaaaacacgcatcttccactcactttcgtttcaaatcttaagtttaaatatccataatatttgtaaattgtattcacgtaaccagaccagatccgatcggattgttacacacagacacacatagataactgttttgttgacagccaattgcagaaaattttgtaactaccgaaaataatatatataaatgactcataactatttgtggataagtagttgactgagataaactcatttatcgatattggatctcaatgcagtagtctttaacttatcttaatatacacgactctcatcttttaacagaaaatggcatcccatcccttatatgatttattatttttagtgaaaataaatctttataattattttgataatagttacctttgatatatccacatccttcactgccttttaatgtctcaattataaactttttagtcattttttcatttggttcattactatgtgacagaatactattactatatgtaaatgaacttagcttgtacaatctttatgaacataatcagtatattaaagcataagcaagagtccaagccattttacatttctcagaagaatattggtactgattttttttaaaacccccaaaattacacaataaataatgtgaaccagacctcttcttgtggtcgaccgcatatattagaagaatttaaattccagttgtgacacatggacaatagtactaacatatctaagatccaactatagtatatgccagtcttatgaatcgattatttaagaagttgaaatcttgggctacgttacgtggctcgatgtgtatattggggactaataaggcccaaatcattgttacggcacaatataactcggcaaagcccgaggcaaaatatttcttgtttgcttatgtttgtctcgtgtctctctagtgcatgtgcaatatttgtatgtgttctggtaatctggttattgaacagatatttgataagttcgtacaattaatgatgagttgaaaggaggatctttttgataatttatcttcaacaatctcgaggtttacataagtgtaaggccagtttggtattcgagataagtgaaaagggactaaaaacatgtttaaaatctagatgtgtttttaagctagggttttttgtttagtcttcgataatcatttcgaaactcttttattcattttggactgatactacatgaataccatacaacaaaagaagtcaattcttactaattcttagcaaaagctatgaacaacatcttgacattgtttatttcatggtgcaacttagcgaactgggtatgaagtgactttcttaccgcatccgagactccgccccggactgacatctttaccggatccgcgaacgggctggagcaagaattctcgaccatatactcacccgcaatggcacagacttcagcattgtttgtg

SEQ ID NO: 28609 - DNA, 808 bp, Arabidopsis thaliana columbia
ttttgctactgctgattatctctggaaatttgaaatcttcgtttctcgcgccggcattgaaatcagcgagagaggtaacgatcctggaaactcttgtgttttctctcggatttgcatctgcctcttcttcgattttcaatttttgagatccttcgctgctgtttttggtgttatacttcagatcggtaagcttaatcgccgtttgttgttcttcaatcactttctgcgacgcgttctctctctatcgctctgtcaaaatcgcaggtaagcttcttcaatttcttcttagatcttcacattcctgctgcgatttcgttgctatacctaagctctttacaatttctaaggtttgtgtcaatctcgaatcagggagattgataaaccgatttgtctccagtattctgaagaatcgtaagtcggaatctaactgttgagttgagttcatcgctgtgatgtagaaacccttaatttcgggactgtgcagtcgaaattttgccgatctctgaaatctatgcatatgcccaatttctagggtttccgttttctaaatcgtttttatgactagaaactagttgatcatcacagttactgttagttttgtacctctccgatgactatgaactgctaactactgaagtttgacaggtcttaatgcttactttgtacccattcgtgtttgcagtttaacaattttcagtagttagaatgaatataggttaattaaaacttgtattgtgaatactagttaattggtgatctcaatgagttagttcagtggagaatggaagtttcatttagagcatggttc

SEQ ID NO: 28610 - DNA, 481 bp, Arabidopsis thaliana columbia
ttgttacaagataatctgtatccatttaattcaacctgtccatatccttcatttatgtttaccctcaccattattttcatttaaaattgtttttttctcaatgatttttaagagtttgtgccacgattatctccaccaatcgtgccccaattatggtaaattgtgattggagtgtcatcattacaaatttacagttgcttagcagtttttaagattaataattccactacgccaacctttcaatgtatttaacacattgagataaccttatttaacttctttaatgaaattgttcttcatatcttcttattttagtctaacaactatataaaaccagaatttcacatatatcaactttaccatacatttgatgatcacatcattggacttaacttattttacgagagtggcatgcatcatagtatatattaaatttaaacatttacttgcatgataagttgtagtagtgttaacttggtaa

SEQ ID NO: 28611 - DNA, 540 bp, Arabidopsis thaliana columbia
caaaaaagattccatttttccgatctgattcacgaaagaaacctaatacagagcagagaaatcaaacaagatcaatgagaagtagtataaacacacataacaaactcgaatcaattaaaaattggaatctagattcaataaccagatctataaatcaacacttctctcaaacaaaaatcgacacttggttcaaattctacagaaatgcaggaatcttgagaaagtatgaatcgaagaaaagtgaacataccttaaaaggagattagtaatgaaggttgagctaaagaaatgtggtggtagtagtagtacgaaggtgaaggaggagcgtataagctttatatatacgagctcgtcgagggggttggtgtaagatcgtaatttcgtccagattcattcccagtttcatctaactgtgttcagacaatgagatctagatatctgacggttcagattagatctagaaatgtaagaaggttttaaaccgttggatttgcttcactggaccaccgcgtgcgagtacaacttgacagcatctaatga

SEQ ID NO: 28612 - DNA, 462 bp, Arabidopsis thaliana columbia
cttcataaatagagttatcgagcaaaagccattatgttataagcacatacaattcctagttcgctaccatataaccaaaataatttggtctctgattaagttttttttttttttttttgtcaacgtctctgattaagttaaactcatatagttgacagttgtaagttgtaacgttggctaatattttagtcaataaattttgttcaggtataaagaaaaaaactaacatttcttttgaagttggtagataaaagtctttccaaacataaaatctgaattgtcttgaaaccaaaaacatttgagatcagccttactacaaacgaagcaacacttagattataactataagccaccacaaaaaaaggtaaaaccttatagacaaaacctactcttcgtcaatcaaaccgaaaccaccctcatagtcttcttcgtctgattcttctttcttctcctctaccttag

SEQ ID NO: 28613 - DNA, 559 bp, Arabidopsis thaliana columbia
caccgtagtctatcaactcaaacttctctagacacgaatacaagcattcgggataagagcccctatcgctctgaaagctgatgcgataggggatctatctgttgatctctgaaaagttttgacatggtattagcaataatgctagtaagtaaccacacgtcagcaagtgtttgtgctgagtcttaaacatacattttaggctcaatactgaaaactacacactaaacggaattattaggctggatacagaaactacacactaaatgtagttaagtggtcaagtgatcatcattcttctaactataaccttattatgtagacaggaaacaaaccgatgaccttattcgtctaagctcataagattataatatacataaaacgcatttgaaatcacgaatccaatttgtagttaatccaagcatatgtataaacaagcgttttaatgatttgttgtgatattatggatttcatgttcacaagtttttgcagtgtgatacagagccgatacgttttgtttagggtttgatcagtgagtcgtgacaataaagttttgacaaag

SEQ ID NO: 28614 - DNA, 872 bp, Arabidopsis thaliana columbia
gtttttaaagaaatatttggacttggcatgtgaagaatgatgtttggcaaatagcactcactaccctgtaactgttttctctatctctgcagcttcacagataatgcaggtctttgcggaatcccggggctaccagcttgcgggcctcacctttcttctggagccaagattggcattgcattcggtgttagtctagcattcttattgatcgttgcatgtgcaatgatatggtggaaacgacgacagaatattcttcgggcacagcagattgcaggtaaacattcatttccgtcactaggaagttgtatttagtcttttaaaacaaacctttatgagcctgcactgtgaaaatattgcagcaagaggagctccttatgcgaaaaagagaacacacgtatctcatgacatccaaatgtcacggcacgggcacaataaccatggccaagctcgtaccgctgtggaaaatggaccgagcttgttgtcttgagtcacttctttcaatcttctttgggttttttcagcaacacgaatcccaaacccccacaaggtcaaaatgttcatatcatgtctaccacattgctcgccacaggaagaagaccaagaggaaatacatttgtaaatggtcttgggttcttttaattatccagttcatagaataggattcgatttttcttgttcagtttttatgggattagtcctttggtacttttgtctggtgggagtttagaggataactagaacataaaaattacgtttcaatatattacacatgttagttgaaaacaaccgaatgtggagttgttatactcaatggatacatctcctagaagctagaaccaaatcaattgatcacaaaacagactttgtcctca

SEQ ID NO: 28615 - DNA, 517 bp, Arabidopsis thaliana columbia
aaaatatacgattggaggtttatatatagattgactttgacctaaaccatagccgtaaatcggaaaatgacaatggtttatctttgtgcaatactagttcaaaatgcaataatagtaaaaaataggaaacgtagggccttctccattagtgtataaagtactcatttctaactttttaatatatctttgtgccaaaccacattatgacctcaaaactacttcctctcctcctcaatctcatcttcctcttcttctttccccttctaaacgcatccgaacaaaaaccttgctacagtttctcatgtagtcaagagagcgtcgttgctcgtttccctttctccctattctcctatcaacctgagtcatgcggctactcaggattcaacctcatatgcaaagatgatgccaatactaccttaaagcttcctaagtcatgaaccctttcttgttaaggagatcgactatgaaacacagcgtattcgcctcaacgaccctgagaattgtttggccagacgac

SEQ ID NO: 28616 - DNA, 1157 bp, Arabidopsis thaliana columbia
tttgatgttcatatcacctcgaaagccatgtcagagaataaagcgataccaatagtttctttcagatttttaatctatcttttaaatttaagatgttaccaattctgatcaaaaccaggggcagaaaatacattcagttttgtgcaagtatgtcacttttcatacttgataactaaagaattggcatgtcactgttcatacgagtaaacagaaactaaattattttgttttattgatgaagataaaagaatttcatttactcaaacctagtagatgtgatgagtgtcctagaggtcctcatgtctctattttgttgttgaaatattactttgcaggaagtatctagcgtacaatttgacacctgttgctggagttgctgcacatgtatctcgaaatggacgtcctgttgatgttcatgcagccagccccataatgtctcctttacctttgtctggtagtgtgaatctacctgtcaccatccttggatgcttcctcattcggaataattgtggtcgttttcttttcaaaaataaaaatgagagagctatgtcagagccacagcttgatgctggagatatattgattgatgcatggaacaaagagttaatgtcatgtgtacgtgattcttacattgaaatagtggtggagatggaaaggctaagtcgagaacattcaagctcttcaactgagtcaagtacagcacgtcagctggccctttctcttaaagcctacggtcatcagttgtattccttctggccacgatctaatcaacatgacgatgctatagaagcagaagtgctcaaaccagagtgggaatgcttggttgagcaagttataaggccattttacgctcgtgtcgctgaccttcctctgtggcagctttactcaggaagtttggtcaaggctgaagagggtatgtttctgacacagcccggtagtgaggttgctgttaatttgcttcctcttacagtttgcagctttgtgaaggagcattaccctgtgttttccgtgccctgggaattgttggctgaagtccaggcagtagggattccagttcgagaagtcaaaccaaagatggttcgcgttcttcttaggaagtcatctgcatctatcgatcttcgatctgttgatacttttattgatgttcttgaatattg

SEQ ID NO: 28617 - DNA, 707 bp, Arabidopsis thaliana columbia
cattgtgttctctttttccaaaacctttaatctttacctcatccaaatctcattgatttttctatctccgcatttataaattctgaccaacccagaactcaattcacaggacccaccatttcttttctcaactcaggacatgacttgcacacaagcaagtcttgattttgttctcttcttctgtcatattcttttatgtgctgcttcatcacagtagcttttctagttagcttcgtgattattgatgaagtaaacaaattctgttaaaacgtttattttaaatgttaacactaaaatgtgacatactacagtcatccacaaaaatgttgataaggcatatattttcacaaatcataatatttcgttaagatttaagacatttttttggctgtttgaaaaggttatttatcattagtggtttactggtcttttattggaaggacaaacatttagagtgttccaatatttgttcaatttcttcttcataaacagtaaaaaccttattctagttatgtaggtacccattattgtgtgattgtcagtttatagctgaaaagtgaaaacttaaatgtccaattgaatgaggttcttcttggttgaaagattaactagactaatgtccataatctttaactaactttacgtacacttaaacgatgcgacgtacaaagaccaaaaaagttagatttctataggtttatgagatt

SEQ ID NO: 28618 - DNA, 558 bp, Arabidopsis thaliana columbia
ttcggtgccatgaaccatcctctgtcttcaccactaccccattcctagactgttgcacctccctaactacctgccattaattcccacaacttcatcacactattgctcctccaatatagattactaatataacacacagctttcaaagttaagccagctggtttatgagagaggcaatacataccacacgctcattcatgcataccccacaatactgcttcccaagacactatcaactttcaatagacacctgttactatactacacacaaatatagctacaaggacccggaatgtaatccattccactatacaccaaaggctgagagaaccttagcagacaaccagataatgcaaatcaatcaacctaatagagagtgacaacagctaacaagcaaaagtagctttccaaataacgtcaatatatactcttttaactcacaacctaatcaatatcagagatcttactatacctggtttagtttgaggcggtagtccaagacatttccatgtgaggtaacgagacattcctcagccattttataaagtaaagattcgt

SEQ ID NO: 28619 - DNA, 570 bp, Arabidopsis thaliana columbia
  unsure (1)..(570): unsure at all n locations
tgcaattggactacatttatacaaatatttcgaatcaaatgaattaatcactacgctgattttacgccgggaatctcgcttcgtttacttcggacgttacgaactctctagctcgagcaattaatgagcgtctttaattcgagatccttccgttactcgaattaaagctaaatctgacttttgaaccgatgggcttcttaaacaggcttacatctctcgatgggccctctgctgggctcagaccgcgtattgggccggatacgaaatccaacatccacaaacttcattccgtaaaattaaatattatttttgttatttttaaatattcttattgtaatatattaaaaaatcaatatatttaaaaataatcactgatntaggnatttatgatatgggattatataaaaccgattattagtgtatacctttcaataattatcataaatatattttaaaagtcaaaatttctatacattgatattgtcactcatgaaatcgtagtgattacccgtagtaccacgggctaatttttattttattttttataactgataaatttgttgattttag

SEQ ID NO: 28620 - DNA, 706 bp, Arabidopsis thaliana columbia
tttattttttatttttaactaaaatcaactaatttatctgtttatataaaaataaaataaaaattagcctgtgatatcctacaggtaaatcactacgatttcatgaagttgcaatatccatttatacaaattttgacttttaaaatatactttatacaattattgaaaggtatacactaatttttttatatactacaatatcataaatttataaatcacaaattatttttaaatatattaatccaagatctacaatccctcaatttttaatatattacaataagaatattttaaaataataaaaataatatttattttacggaatgaaattatctggtggaacgagttttgattgatattcatacgggacgataatctacgagtaaaatcttagaattaacaattttaacacaattatacaatcttaaatactaaaaaaaacaatatttacaaaacaactataacttaaaaattcgaatttttagttacaaaaaaatcgaccaacggtgtaccgcgaagtaaatttcacattatatcatctaattgatcaaatttcaaacaaaaacaattaggaggggtattgaaacaacgaatttaatagaatttgattgaatagaattataaagaaaaagttagatttttaaagattgtgtaaagattttgaaattttctttattaatctataggatatattttgcaacatttt

SEQ ID NO: 28621 - DNA, 1164 bp, Arabidopsis thaliana columbia
atcgtaggggtacgatgttgattggagtaaatgttgactacaacttccctgccgtgaatttcgattggggaaatgattttgatgatcaaatgaacaataatgagttaatgaaactgctcatagagactgccattgacgaagaaaacgaagaaaccggaacaagacttgagtttgtcaagtatgtgagtgcaaatgtacttggcgtccaaggttttttgttttacataacattctgggcaaaagatctttcctcaccaaatccacagccacattgttaccaagcaaaagtgaggaagtttgcggctgagatcgacgttagtgagtttaggctaaggccaacaaaagaatgatcaattgtgaggtacaacttcttatccttaacacgaatggcttcatcttgttaggtcatttcttattgaatatcttaatcttctcgatgtatacaggtgataatcacttccaattctgtgcgcttccagtgagaagactctttattggaacattttacttatgtagtaactttctgtcatgtattatgtcctaattaaataatgtagacttgtatgttattggtctttagaactaaatgtatctagatgcttgaaaatcgcaatccggatagatatgtgactgatgaatggttacttacattattttcttcggatgatgatggacaaaatcttgtgtcataaaaaacaagttgatgcttaaacctaattgaccagtttttttttttcataaacaaaacttggatagtaatgttaataaaagatggggtactatccaaagaaaatgtaaatagttgacacattccaagataaacagagattatttctcacagcttaccaccatatatcattttgtacctatttgcccatattgcaaaacaggtgccttgttcatggtttctcaattctcactaagtaaatcccatcaactttggcaatccatgcgcgtgtctcattacatcgaactctcatagctcctctatatgctctccataagtcatgaaagtactccattttctgatcatgcctcaagtgacaagcccatactatttgtggatgttggattttgtatccggcccaatacgcggtttgagcccagcaggaggcccatcaagagacaagcctgtttaagaggcccttcgtttcaaaagtcgga

SEQ ID NO: 28622 - DNA, 1061 bp, Arabidopsis thaliana columbia
cctcggaggcatgacaaacaccgcgaagtaatttgcaaggagagaaatcagatctgaaagccgtttttcgcgaaactttcttaggcggccgaagaacacttgaagatcttcttcaagaactcaagaacagagatgggtctgcgccgtgtttaatctattagtgaaccggagcgacggcgagcctaagaaattggcgacggaattcgaccagaaataggcgtagagcgccggccgatgttgattggtcttcggaattctaaactgaaaatctaagaaatcgataaggaatctactccaagtgctaccggcctaaacctaccacgattctaggtctaagattccgactatctatcaattcaggcaaaattcgaaacgagaattaaacgaaagagaggttgagaaagagtcgggattgttacctgaggcgacgagtgagtccgatggcttttaagaggtcagtcagaaggtgaagggttcgtcggtttatataaaggagtaaatgagcgggaaaacccaaaaccctaggattacgaagcgtcacactctttccaagaaaatcctcgaaaattacgcgattcagtttcctttttttacctcgggagattcttattctcccggaatgacgttctatgatctccggagatggcgccacgagttgaacttaagtccccgaagtgttcacttcgaggacttgggaggcaaattgtggatgttggatttcgtatccggcccaatacgcggtttgagcccagcagggggcccatccagggaaaagcctgtttaagaagaccgtcatttcaaattcgatttaggctttaattcgagtaacggaagaatctcgaattaaagacgctcattaactactcgagctggagacttcgtaacgtccgaagtaaaagaagcgagatttccggcgtaagatcagcgtagtgattaattcgtttgattcgaagttctttgtataaatatgtttcatttgcgattgtacgggggacggagagatacacagaaactatagaaaaataaatatactttttccgattgatcattgttcgtttaac

SEQ ID NO: 28623 - DNA, 842 bp, Arabidopsis thaliana columbia
tgaatttaatgagttaattatataaaaacggttagatttaaaccaaaaatcaaaaatggcatcctcaaagaaaattttgcatgaattaaagaccagtttggttcaatgttttgtcatcagtaactacacaaacaaatacttaaaaataaatatatctacaataatattaatgtgtattatttgtatctaattgactttattaacacctgcctaacaatctcccttacacgtaatgaacttccaatttacacggagaaacaaccacccctgttgacacgtgtcatcaccacaccgaccggcggtgcatcacccttagctaatccggctaactccaaacgtcgatgagcagacggacgaggaagattctccggtacgatggtctctagcgagttctcaagccaaggcggacacgtcctcttgtcactccacctccgcggcggcaccacacccgcagccatctcttctaccggcgatttcacaaccgcagcttccactgatgcaacatcattgatctgaatcccgccgattacgacagttgccgccacccccaagacaaaagaacacttgtttttccgtggctctgtctcattttctgttctcctactaaacaataaaagaacaaagatcattgatatgaaaaattatcaggtaaataataacttttcatgaatagaagagataccaagagatctttgacgttgtcttgagcagtgaagctaatgattgtgcagaatttgaatctaggggaggaagatttagacagcagcttattctccctgccattgttattctctgttttcgtatcatctttttcttaagaatccactagacaaattttattt

SEQ ID NO: 28624 - DNA, 769 bp, Arabidopsis thaliana columbia
ccattaccggccctaagacatgaagacatagttcagatttcggctgagagggtaaaaagggctttacatgatgaattatgtaggtcggatatgaactctcaatcccaactatcagatgatttgttttcagcacctatcacgacctctaccgcggcctcgaccacgcccacatttcacgacctgcatcacaagccaaaaggtaaatgtaatatcttaactatttaaagacaaacaaatgatcataccagttttctaatagtttttttgacacagttactcaataaaatgataaaacatgatgagtttgtggtcgtggacgtcgtggtgggcagattgcggatacaacagtggacaaattcgagtatcggcctattgcagaggcgagtgtcttggagacgtccaaagtggataaggaggcaattccaacttttccggtgtttattcttgaatcattctcgatcgcatcgcacagaattgcgagtttggatggtgttgagaatgagacaggtatggaaggcgtgggggtgatgggatcactcgtgaatgattttgaggaggaggtagagcttatccaggcgcctatccccaattttttcatggatgatctcgtgttgatcgagtcggagctggctcacgatgggacttggtgggatgatacctagttctcccaacaatccggactcgacactcgttggtgctgaaatagagtttgatcttgtattgttgtctgatggcgatggggatcagattgccctagtacgccggtgat

SEQ ID NO: 28625 - DNA, 728 bp, Arabidopsis thaliana columbia
gttgaagcagaaactggcttctcgaggactccttcagtggcttttttgaataggttatgtacctgtcttgaggtgaaaccgatcttttctaagtcggtaagctgttgagaatccatacatttggttagtagatgacagatagtttagcactaaacgctcaaatttggggagagatattgagtgtgttaccgattttaaagggcttgtttctctgagttcaatgatgtactcagccatcttctgcccaattccctgaaaacaaaaaaatgaaacagagctacatgcagtgaaatcaatagagactatggaagtaaggttacctttaattcccttagctcctctctgtgtgttcataaattaatatatgaatgaagttagttcttgtgtgatcctaagggtaatgaagaatcaaaggtaggcagatgaaactggaggctattattacctgttggctgtgttcaagaagtgaatgtactcttttatgagagaggtctgtgataagaaagtaaattgcatagagaatcagatttctagtgttcttgtcaaatataccatgattttgggaatgttgatacctttaaattattgctccatgcattgaacttctggcaagtgccttccatctgcataatttcagggtttgtagaaagaaaaggtgtttttggggtcattggcttcagaaaaggagagcttccgtgtgctgaatttggttttgcattggagtctat

SEQ ID NO: 28626 - DNA, 548 bp, Arabidopsis thaliana columbia
  unsure (1)..(548): unsure at all n locations
ccgatcattggaggatagaattcttgaatggagtccgcaaaagcgatcagggacctgtgacaggaaatcagacttcaaacgtcttgtttggtctaggagattcgtcctacttttccatgaactatcaatgactggtgctccaatttcaatgatggagttggcttccgagcttttgagctgtggtgcaacagtatatgctgtagttctgagcagaaggggtggattattgcaagagctcacaaggagaaggatcaaagtggttgaagataaaggagaactcagcttcaaaactgccatgaaagcagatcttgtcattgcaggatcagccgtctgtgcttcatggataggtaaggaaaagtagatctgctgattctttgacatcactatttgctgactatcatgtttagaaatgcgtaccatagctcattcgtccttcagctatattactggaaaatgcattttgtaatagaaattgtcatatatagcatactcactttagattgttttctattagtgaaaactttcatcgaaacaattgttanaacatg

SEQ ID NO: 28627 - DNA, 730 bp, Arabidopsis thaliana columbia
atagcgtatctattccactcctacgtgtacgcatgtgattgagtataaaacgataaccttttgatttaaagataaattgtaatctaatctatatattataccattagaggatgcaaagaccgaaaatcgaggtaataaaagcacatgaaaacttgaggcaaataagacaaaatatgagttatatttttatttaggagattaccttaataggaagaaaatcacactaaagttaatttataatatttatagagtgtatatatttattgttattattttttatattaatataattaatacaaaacagtaaaatagatagccttaaatgaataacaagaaaaagttaggtgataaaaaagaaagaaggatttaaaaaaaaaagttggacagaagacaaaatttagataatgtaacgatataatatatgttatcaaaatcatcactacggaatcatccagactctccattttggttcaacgattgtttttggcttaggcatttgagaaattggcttagacgcatgattaattgaattaaaatagagtcaaaatcggattattttcagttaaattctggataactcaaaccggatgtataattatcggttaacaggttggttcaattggaagcgtagttttaagaacaaatccgaaagtacgtgtagttttatcaaaattaaagttttttataatggttttttaagtggctaaaagtttaaggtggaaagttgaga

SEQ ID NO: 28628 - DNA, 794 bp, Arabidopsis thaliana columbia
agcactttagtcacacgaacgaaggtaaatcaagcatgcaacaaacaatcatagtaacacgcaggaagcaaataaacaagcaaagatacagaagcgagaaaatagacttgactaaatctagacgcaaacctatggacaatgtgctccattcctcctcactaaatgtcgaaagttgagttctcctatatggatccgtcaacccgaccaaccacttgttgaatccacacataaaaccaacaagatcacgacttattgaacccacccaagataccaataagcccaaatgcatcttcatgcactctcggcctaggtttcgatactagcccgcgagtgtgcccttgggaccaagactcgcaggcttccacactcacatgcaggaaattggagcacactaaactagactctcctatgacccgcagattccgcatccaaggtatcctacacacacattgcacatccctcttccgacatggattcgaggatggcggcaagcaaaaaacacaacaagacacgacacaaaaataaacaagcaatgcaaacaaagaaacaagaaatcaacaagcaaagccctagttttcatctacatgcagcaaagaacctagtatgattttaaacaagcaattctaagcaaactaggtgatgatttttatatgcagttcattgattaacctagccggattttaaacaaacataagacatacaacaattggtctctctaggtgttttctatgtgatttaggtcatagcttatcatgcatgcaaccaagttctaatatgatgaccctagaatgaaa

SEQ ID NO: 28629 - DNA, 853 bp, Arabidopsis thaliana columbia
  unsure (1)..(853): unsure at all n locations
gaacaattctagattttaaatcactactacagtgtaaccggtggtttgcctcattattcactatgtttaatagtattgatcccaactctattataatcaggtttgataagttcacataagtacctaaatcgatgctagtccgcatctaaatactatgctcatgtaagatagctctggtaatagatgccattttgaatactacttcttaacctaaaatcaagttctagttaattcatctagaactagcattaagaacaatcaaagatgaagaattctaaatatattatcctaacatggttttcgatctactaattcatctaaatcccaaatgagaatccctaaatccaacaaaagaactactcagacatgattatcaaagaacaaaacatgattaaagtagaaatcaatgtaagaaacaataagagaatagagtttagaaagatcttctctgaaggagctccatgtaaaaattagaataaagggtaaagagaagttatccaaagttaggtctaaacaatgaccttaaaaatctatatataagttcctataaacgtgcagggacttctttggaaataaggaaaagttctgggacgaatttagaaagcttcaaaacttcaagaagttgcgaaattgaatcgtcgtcagatattggtgtcgatcgtcacctacgcggattgcttctgcagcataagttgtctgttttgctctagaatgctccataatccccaaatgcatcccaaacatgtaaagacctgagaaggactataaaagacattagaaataacaagagaactgtaaaagctatacctagatcatagctanaagcattgaaaatcgaggtatacattagaaa

SEQ ID NO: 28630 - DNA, 931 bp, Arabidopsis thaliana columbia
agaatcgaacttgaacttgaaatgagaagatattttcaaagcttttgtaaaactatgaacaaagtgaacaaggaagctctttttgtctctagtaatataatttttggttttcaatttcaatctcaagccaaataaaaatttatcttaattggagagtatgagccattggtttctttaagattaagatttattttgcaatttaaatttttgttttaaaataaatttgagattcagttctctaagaaaattcttcttcttcaacaatggcggtttgatttgaggtttgctctctctctcatgggtaaaactcatttcatctacgtagcatcgagattctggttaatcgaatctcttgttattatggaaatgatatatagaatggatatagatcagtaaaaaggtttccggatggatatatctaaatgaacttgttattatggacaccaaaaaattgtttgttgagttttctttcagtttgtagagaccttgaaaggccccgatccgtcctgcctaagtccgggcgagatctcccgacccaaatcactaagtgacttgaccctaaccgattatgaggttcattccctagtgaaatctatttcatacgattctatgattcaatgtatggaacgaatagagtaaacaaacaatctgatctttattaattaagcaaaggattcaataaaacttatgagtttgcatataagctattgcaagtcatataatcgatccctaggctatccgaactataaccatccatcataccggccttgagtctctcgcgcctaagccaagttcttcccacgatctccattagttcctgaaagtcatagagccataagtaatctcgtttacttagtcatatgcaagtccatgtaatgctctatagtccatacactactcggatccgtggacaggattcggagaggggaag

SEQ ID NO: 28631 - DNA, 1001 bp, Arabidopsis thaliana
tcattcatcattgttttatatcttttctcatcattcttgcatactttgcatgattaggatagctttgcatacatattgcatttctgagttgttttcacgtgatttagagctgtttgctaacaaattgaaagaagcgagccagaaccagaggacatactcgacccccaagtcgagtacatccagcaaaatactcgaccccctggccgaatgattttagagccattcttcccatctactcgaccccgtggtcgagtaacctcagctcaggccactcgatgatgccactcgatgacgccactcgactctctggtcgagtatctcttcgccacaccacctgaccacactctgccgttcactcaaccacatcactcgaccccctagtcgagtatcatcactaaccaccaacaccatcactcgaccaagcactcgatcacatcttcatagtctactcaaattcgcactcaaccagacaagctgagcacaaggaaaagaagaggggaagaagaagtgtttggaagcggcctggagctccatcggatcacgaagcccatctcggcccattatcactctatgggccgggcgattaggttaccggcccgtctactatcattttattttgttttgtataaataggtgtctgagggttttgtcctgagacatctagtcgacattaagtttttgcttcagttttattttctattttactctggctgcgtcgcttttgcttctacaacctgtaattcgagatttttccaagttattcagattccgcatttgatttcatatgtcatcttgtttctctactctttatctctttacttatgcaatatacttgtttacttgtgtttatgtctttgagcatgttgtctgagtagtgacatagagttcttaaggatgggatagaatggttgtggaatccttagtctgtagaatggttaagttttagaattgattgaatcccttcaggactagttgtgtttactgcttatttctttctgatc

SEQ ID NO: 28632 - DNA, 609 bp, Arabidopsis thaliana columbia
tctagtaacgagcgccagtgtgctctaaagaaggaagggtctagcagctaacattggagagtcagcccacagtcactaagctatggcacgaaggatgaaggctaaactgtgtatggcagactattgttctttgggaaggatatggggaaggaataagcactagaatagaatactctgaatgtcggggttcaaccgctagagtgtggagaccataagcctcagccctaagtgagaatatccgagcacgaccaatcacacccttctctatacgaggtgggcataatgatgataccaaaaataaacaccctccggacgacagcatgagtacgagccagacgcggctgagcaaggatagcagcggctgagccgcatctcatagggccacgaccgcgataatccagagctaagatagcgacgtttcctggatgccagtgcacaattcggcgctgcactctgactgcacagctctgcagcggtggataagtataaactggcctctattggctgttcttgttggtaagactgcaggactactgttgggagcggtccccataaggctgatggtactgcctgtgggtagcacgtgaaggggtttatcagtgctggtaa

SEQ ID NO: 28633 - DNA, 940 bp, Arabidopsis thaliana columbia
ttcttttttttaatctttgagaagacagtgggtggggttccactttggcttgtcctctgtatattttttttattagaatttaatacaaatgtaactgaagattattattggttacagaaaatatttgtcttcttatctttaccaaataaagagtttagattatctgttcatataactttatgctcctggaatggaatgtgttccagttttctaatcagatttgtgttatattagtaactaccaaataaactttggccatactcattaagaaacaccaaagcatagaacaaattagaagtcataataaatattacatacattgcacttgatcaaactactctaatattgtaggccaattctttgattgtcccagcttatttatatattttatgcttagtatttgatatatctaggacatatcagaaggcttcttaacggctcggagctgaacagagttgtcaaaacagtggaagaagccaaagtgagggaacttctcataccaagtttcttgtggtacatgtgtgtcccagtgttcaccgctgctgctttttccgtatttgtgaacccatcctgatccgttgtgaccttctccccagcttcggttccatctgtcgccgtgcttcccttcccaccaagtctcaccttgtttcactccttgagcgctcgggttaaagttctcgtcccatttgtctccccatttgtcccaaccgtcacctacccaccgttccgcccacttgtctgtgtactttgtgcttccgccttgcccgtcatacttctctccccacctggtcaaaaccaatcaagacatatttagaaacactctacattccctgttatttggtcacagcttgtctagtgtcagttctgttttgataacagttcaacaaagctcgcagactaagcttctaaatgttaatagagcaccttaaagagtatgaaa

SEQ ID NO: 28634 - DNA, 1051 bp, Arabidopsis thaliana
  unsure (1)..(1051): unsure at all n locations
atccgagtaacctattgaacttttttattctaatgtttggcaattggcaagtgtaaaactcaactttacctatcgataggatgctggatcttggttacagtatgaggaagagattctaaagataatttaaagaaaataaaaggtagaacaagaggaatagagcataagcagttaagagaagaaataacatctcttattggttttctcaaatgttttggaatcataagaggttttacttaagacaaaagttgcatagttttaggatagacgaaagcaagtctgttatagaaaatgttgatgagtttcagatgtacaccgcggagacaattcattttttaaaattaatatatataaaactttgtaaattatatctaattatataataccagcagganactagntgncaattgttattaagtaacgtcctgccaaacccgtcccgccaactcgtcctgtaaaaaaaactcatttattttattaatgttgatcttatttatgatatgtttatgaattattgtctaaatattttgtaattttgtagtaattaaatgctatcaaatatctatgcggcttgatgattataatcatgtcgaaaagcaatatcaaaaatgataattttgtagtaattaaatgatattaaatattttggaagttttattttagtaattaattgtgtagttaaggtagaaagattttgggaagattgttaaatgtcaaatatttaattagaagattttctttctaattatcaaaaacaattattaaatgccagtggtagcgactgtaaataaatctcaactccaggatttatttcacaaagtgactgcaaaaatgtatatataaatggttagtgctattacataatgaaacacgtaagacttgtaaaacctcaaatgttttaaaagaccctatacacttttgacaaagaaaataggaaaaacaaagaccctagagacttttcaattatgactatagaagttaacaaacctaagcaaagtgtttggatataaacatagaggttaaaaaggatttagataatacttagaaaatg

SEQ ID NO: 28635 - DNA, 843 bp, Arabidopsis thaliana columbia
tgcaaacataatgctttgaatttgcaaatgtttttttttttggtaaaagaatgtgtaaaatttggtttggaatgtgtaaactttcctcccaccaacaacattctttacccataacatcaagttggaaccactaaaatttggaattgtaatacaaaatcttaaatatatgctacaaccattttcgtaatgtgaaaaaaaattgaaatgtagagaaaacagtgtacataacataatatatatttgccaaaaaaaaaaatatataatactagcactttaccattgttcaaacgtaattaggtaagaaattaaaaacattattttctagtttcttttgactaattatataaggaaataaattgaaagtataagttatattcttttgattataaatctataaaaaaataaatggaaaggttatagtacctctcaactttgaccacaaaaaatatcatttacacaatgaaacccgacccggacgatgaaccggactaccttttgggtcaccgggtcatcgggtcaaccgggttggaccacgggttaattagttaaaatttatttaataaatttaatattaatagaaattttagagtattttatataaaaacccatttagtattataaatgtgagacaaaaataatcatatcatatttaatcaaatataaaattatattatgtttaacaaaatataaaatcatttacacccaaatatatatatatatatatatatatatatagaggaaatcaaacaataataataaagtggttaaaaatttgagatccagtaaatgtctaacagcgtaacaaatatattaggagatcatcactgacagagatagattaat

SEQ ID NO: 28636 - DNA, 1274 bp, Arabidopsis thaliana columbia
cccattcattccatacacaatcccaatcccaaaaatacaagtctccacctagtcttagctaacccaaaaagcgtgggctaggtctacatgaaagagtgctcttgtcggctcatacctaacacgttataccaagctcaattgaaaaagacctcacaatcacacacaaatgatctttggcttgaaataaggctacgctaagggtatggaaaactgctctaaagatgagagataactacttggattaacagagggtgatgaagtgaataagatgatccaagtatgtatatggtagccatgagttcataaacaatgcatagacatgataatttcaaattcagttcaggttctcatagatagggaatggcatcagataagcgagttttgatcaaagtagtatagtcaagttacaaattcaaagcagggtgcagtcttacttcagagatacaatcgttatgcaacagagaactaactacctgagcacaaaacacaaaaataaaaataaaaagatgctatggtatatacaatggagaggtggtgttacctctatgatcaggtgaagtagatgtagacatagtcatccatactctcttgggtataggtagaggctgaagttgaggcggaagggtgttgctcgttctgtccggtcgagcgtgtggaagctcgtctctgcctgctccttggctctctcaactcggagattgataatatatttttagtcaattattcctaaaacaccaatcatgtcgttgtagtattttaggtgtcaatccaaatgggtgtgatgcaaacagatgagatgtgatcagaagtcactaagtcaagccaagcaataacagttttggggtttctaacagtcctaagcgaacaggcagaaaacagaagcaataacagaattactaaaatcactcgaccacaacaggctgatgccagaagtaggatgtggtcgagtaacaggtcgagtaatagacaggatatgaaacagctatactcgactgcacagtctgttgccagacactgggtgtggtcgagtaagttggtcgagtgattgtaaaaactaagaaacatgcaatgagaacgattaagcgataacgataaaacagagaaataagatagacgagaatttcctaaggatggggtaatcgagtagagtggtgtcctagcctattcgaatggttaacaagcgcaatcaagctatccctagacaacaggttcaactacagaccaattcactcccgtgatagaaatcctcaagcaaagctagcccagactaattc

SEQ ID NO: 28637 - DNA, 870 bp, Arabidopsis thaliana columbia
ctcattttaaaaattacgtctaagtcggtttcgtggcgagttgtgtaaagaagctggcacaacactaatgatttggttgatttgcttgtaagttgtaataatgtgacattttcttcccttacattatacttgcattgattatattagaatatcacgtaccgtttatgcatattattttagaaaattaagacatatataacacaatagtttttgttatagtatcctcgtcgtaccacaatctatatttaaacacgcataaaacgaatttttaacattttttttctagtcgaatttaagtcttacattttaatttcttaacattttgaagcaatttcaaacatttaaattggtctttaccatgctacagaaaaagtttcacaactccttcctctcaatcaagatcctcacaaaatgatgtggcttatagtgtccttaacaataatccatttgctgccttcaaatctagaattaattcaggtctagaatctgtttgtgatgtagcttagagagttagagatcttgagaaggatgaccaataaaggcagctcaaaagggtcaagagatgtcatagactcatgtcggtggacgcagaaaccatggtcgtggagggcctggaggctgaggcaatcgtggatcattcgattaaggatctctagtgagtatatatggaggctagttcttctatagctactccctagtttcttgagcttgtgatgtttgtagaagctagcaacttgtatgcttatgctgagctctcagatttaggttgcattttctgtgaccttgcatgtaatctctgagcattaaaataacagaaaagagtttatctatcaaaaagatgaggcgttagttttattaggaaagaagagg

SEQ ID NO: 28638 - DNA, 518 bp, Arabidopsis thaliana columbia
cttcttgtttttaacttccaaagctaaactcttttgaaatattcgcaggccttctagcttggagcaaagacagccagtacatatgcacacgaaacgacagtatgcccactgctctgtggatatgggacatgcgcctcctcgaggttgcagccatcctggtccagaaggaacccatccgagcagctgtgtgggacccaacctgcacacgcctcctcctgtgcactggaagctctcacctttacatgtggactccctcgggtgctttctgtgtatgcaatccccttccgggcttctccatatcggacctcaaatggaacattgatggaagctgtctccttctcaaagacaaagatgcgttctgttgtgccacggtcccgtctctgcctgagtccagcgactacagttctgatgactgaagattacttatgtggttctttgtaaaagtttcagccttgtttgtctttcaattttaggagtgttttttccgcgacatttactagtgaatgttaaaaacattt

SEQ ID NO: 28639 - DNA, 1123 bp, Arabidopsis thaliana columbia
tatgtctctctttttatttcttaatattatttcatttcatttttttctcaattacagagttctattcgtttaccacaaaattcagtgagaggctctgtctggtgcgtcttttatagatgttgtatgttttccttgtcttatctttcttttatactttgagaaatcccgtattatatataattagtaaaggcatggtatatagaatgtatataattgaaatattcttttcaaaaatactgattactatttagaatttttatatcatcacaacatttctcacaccagcatatttagacgagtcttatctaataaaattatactctcaaattttgtgttatcacatattttaaagatttatgaaaacaatttgaagttctgttacattataagactaaattcaattatggagtcgatgtttcaagatgttattcataagaattgaagaatgaataaacatggaacccaaatgaaacttctcaaatgttattaatatcttcttctttttttaattattattattacatgtaacgtaagctaaaatttaaaaaaaataagttgaaaaagttatctattttaaaaataagttaaaacactattttggtatgggaggagttgcaccggcaactcttgaacattgttcctttagcatcgaaggaaaaaatggaattaatggaatttttggtatgcaattatcggcgtccaaaaatgctttgcaacaagtcggacctaaattaccgaactttccagtgaaaatggattgagaaatctctacaatgcatccaggaatatccatcacggatgagaaacattttgttatatcaggtaatccaggaatcagttggaacggaaacagaaaaggaagttgagccggaaactgaggcaattgagcatttacagaaactatgatacatagaaccgctagaagtaaaaacacatttttgatagacataatgagaaattgagtaaaaagtcttagtatagcaactatatgcttaatgctttgtttgtttttgattgatgaataacaataaaatccttgcttatttatatggattgaaatgtgaaactgtcatattaattttttttaatttaacatctttgaatactttaattaggtatttga

SEQ ID NO: 28640 - DNA, 1006 bp, Arabidopsis thaliana columbia
taaaaggaatagatacgattacattgcatgtagtaacacatgcgatcattccagcacaaatgcaccggatcccatcagtactccgcagttaagggtgcttgggcgagagtattactaggataggtgacttcccggaaagtcctcgtgttgcgtccctcgttttttttgggttttctctattttgttttgttaaaaatgtatgactctataacttttagaccgtgaggctaaacatggcatgtgataccttttcggaaagcccaaagagagctctccgatgaatgaggaaggaaaatggaattcttctttttgttttttttcgactccaaattttgacctaaatgtacttttttgggctttttcgtgatcttaactatattacggggggaaaattatatgttcggacattgttttccaatattttgcatgtatcaaagctcttataaagaagatagggtattcctacatagctggtgggacccacggcaaatggatcataaagtctttaaaaggaatagatacgattacattgcatgtagtaacacatgcgatcattccagcactaatgcaccggatcccatcagaactccgcagttaagggtgcttgggcgagagtagtactaggatgggtgacttcctggaaagtcctcgtattgcatccctcgttttttttggtttttctctattttgttttgttaaaaatgtatgactctataacttttagaccgtgaggctaaacatggcatgtgataccttttcggaaagcccaaagagagctctccaatgaatgaggaaggaaaatggaattcttctttttgttttttttcaactccaaattttgacctaaatgtagttttttgggctttttcgtgatcttacctatattacggggggaaaattatatgttcggacattgttttccaatattttgcatgtatctaaactcttataaagaagatagggtattcctacatagctggtgggacccacggcaaatggatcatag

SEQ ID NO: 28641 - DNA, 807 bp, Arabidopsis thaliana columbia
ctccataagaataacaaagatattattaaaaaaaatcaagcagaagcaaataaaaaaaaagaggattatgtaaaaaagggaaatgatcatcttcattagcttccctttcggctccatggaggaaaacagcaaccctacacataacaacgtcaattgtaaaaaaagaggatttatgaaagaaagggaaatgatattttggttatctaccttgggactagaaggtaatggttgatgatgttggtcgatgatgggtcgagtcggggtgctatgatcggttccattgtaagatctcgcttggttcctatcttctttcactttgtcaaagataagtgtgtaactctgattttccatgttagaacccgttccaggaaatggaggaatagtcgccacctaattgagaaaaatacacttacttagcgatatatatttatgagttgtgacacatattttgtactataaaatggtaaagttatgcataccctttcactactttgccctctaagattgcgtattggccgcgccgggacatgatcacgtgattgccgtctatttatttctgttggatttcccattgatctgccacctccaccatatgtttgatggttgtatgtttctggtgtgggaggaactgatctaactctgttgtttctttcattgtgtgcaggagacggtctgaattcggtttcgtctctgctattgaatctttcatgtcttggtctaacattatggtttggtggttgttggtcaggcctagacatatttcgattttgtgcagcgtttggattcatatctggatattcattcggg

SEQ ID NO: 28642 - DNA, 536 bp, Arabidopsis thaliana columbia
cttctttctttaaccatggataacaagttttatgtgaacactaacggcgaacgcaacatctggtccacggcggcggaggagaatatgacaacagcggcgtcatcgtctcagtcacaaccgccgcagatgcagtcgtctaagtttcatcaaccggagaaccacatccatataaatgatggtttctcgagtggtgcttttgatttgcaaaccctagaatcctcttttcgtggactttcttttgcagattcaaatgttcatcagaacggtaatccgatactccccgcccatcaatacaatcaggtgtttaacggtggaggtggtagttatggtgatgggtacttatttcctccaagtggttcttatcaccactatgaattaaaagacttgcaaaggtttaaccagaatcaacagagattgtcatatcagaacgattatgttaatcaatcttataggtatgatactattggtggtggtaatgggatgcttaacaatagtttcttgaatggagttccttgtgcttcaagaaggggatcctc

SEQ ID NO: 28643 - DNA, 486 bp, Arabidopsis thaliana columbia
taacaaatgggctatttttgtatttcagaaattaaaggtgtctgattctgaatatgatcagtgaaaagtgaaaactggaaagtatctaaaacgacaaaccctacttttgtttttttcgtcaacgacaaaaaccctactaaggtcttaaaatatgctaccctcgccgtctgtgcatatggcgtcacctccgccgtctctgaatatggcgtcacatccgccgtctccagccacagcctcacgtaaacggttggttactctcaaccattttcttcaaattgtgatattcaattgtatcgaatttgagaagtttgatagtggggaaaattggtttgaatcagaaatgaatctagtttaacatttccatgaaaatcaatagatcttatataattgaaaacaacctttgttcttataacgtttctcgtttgtattgtatttttggttggatcagttgttgaaatattagaactttcactttgagaagaattt

SEQ ID NO: 28644 - DNA, 818 bp, Arabidopsis thaliana columbia
aacatctttatattgaaaaacccaactatatctctcgccgtcgtgtttccaaacccagacatccatgttctctggatgtagaacgagcaacccaagagaacctttcaggtttatcaaatgactagcttctgtaatctgctcgtcttctcttagtccatctgcatatgcaggcaagtttataacctcgaatttcccttccaaatctactgagagaatcttacctggcgcatctaaagaaacgagccagtaaacttttcctccgacaaaaatatgtccagttcttctgtatggcctaagactacaactcataggaagacaaggcacggtgccaatgtttttccaagaacccgtgctggacgaataaacctcgcattcataggctaaagagtgaccgtattttgtaaaaaaccgaccttcttgaacataaaatccctctgcaggtcctctttcttcaggaattatcttcccagtgcaaaaaatacggtaaactttgtagtcacttacatcagagccataagccactcctatactaggctcaaactcaaatgagggtgttccttggggaagaaggagagtctcctttgtaatggggttgcatatccatatctggagatcacagaacttgttttctacgtcttcatcataaatcatattcacacagcagatgatcccgttataggatgatatcatgtacatgaacacctcaggggttctttgagatggatcaatagtactgaggagggaaagtgtacatctgtttgcatccacgaatacaacttcattgttttcccatactaggacagactacaatgatgaat

SEQ ID NO: 28645 - DNA, 1044 bp, Arabidopsis thaliana columbia
agttgatttaaatcctcaacttccaacgaaacgaaataaatatcaaacttttgttgattttccaaataaataccaaattttggttgactttccaaataaatatcaaacttttgttcgagtagccatattaagtatgacattaacagaccctgttattagagtccattttttgttaacagactcgttaattgaaaacgacaatattccctataacaataaaacaacgtcgttatgtcataaatgctcaattaaatcccaatttcaaatcatatgaagatttagggttagaattttgcttgatttggagatttaagattggatttgggaatttaattcggtcgttataataaaacgaggtcgctttcttgttataggaaacaataacgttttaaattaacggatctgttaacagaaaattaactccgtgaacgcaatatgttaatctacttaatattatacctaatatgaccatatatacgaaagtttggtatttatttggaaagtcaacaaaaatttgatatttatttcgtttagttggaagttgataatttaaatcaactttttcaataagttggagattttaatgacatttttcccaaaaatcaaggggagttttatggttttatctacttgacccgacagagaaatccggacccggataaaatccgacccgttcgaatgaactcatacggccgagatttttccaccaaactcgacggttaccactcgtttctttgtccaccatcttctctctctctctctctcaacccccgaaaatctccttttcccaaaattttccgattatctcacgccggattgtttttcaatcgccgtcttcataatctccggcgactgaaatcagtctggtaactatttgaattttcatggagtgggacagtggttacgatctaagcgccgatgatgcttcgtcactggcggatgatgaagagggaggtctttttaccggaggtgaaccaattcatatatcgcgtagggaatttgcttcaaacggcgccttatagctacgttggatgaagtagaagc

SEQ ID NO: 28646 - DNA, 1876 bp, Arabidopsis thaliana columbia
aaaatcacattttctttgtagtcataatcatcaatattggaattacgacgcttaatgaaactatgaaagagtcataattttctagcctaaagaaaagaattcttttttttttctgactcattttcctctagtataagaaaatatctttgtttttgaaaaaatatattaatcaatactcacatgattaattccaatttatgattgagaacgaattagtgataaactaagataagtgataatttatagttttgcaataggaaaagtgtaattaaaatcaacatttttaacaagttgaggattttagtgatattttaaacgacgaaacgaaataaatatcaaacttatgtcgagttttcaaataaataccaattttgttgactttccaaataaatactaaactttcgttgacctagtcatattagacatgccgttaagtgggataacacatcctgttacaattaaacgacgtcgctttgtttttataaaaagcaataacgtttgaattaacgggtatgttaatagaaatttaattttgttaacgggatctgataatttacttaacatcatgcttaacatgaccatattaacaaaaatttggtatttatttggaaagacaacataaatctgatttttgtttagaaaatcaacgtaaaattaatatttgtttcgttttgttagaagttgaggatttaaatgaatgctttcaataagtggggaattttagtgacatttttcccgttttgcaatatttacattgaaggggtttttcattaaatatatagtttttcccttgttcagctcttcttcttaaaaaataaaaagacttcagcatctgcttcctctcgacaatttcgacattactctttcgtttttcaccccttccttcttctcctttagccgcccgtcgtcgatctctgcaacactttccgacgatttctccgtctgatctcaagtgagtctccttcaacttttctcttcttttctatacccttccctctctctatttccttttctccgccacaaacggcttctgcgttccctgtttccgccgtccttacctcttccaatcaaattgaagatccataccagaaatcgatccttctccgtctccgaattcgcttgattaacctcagaaactcgtattggttttcgcaaaaccgcgatttggctttagacttcaccgttacctgattgggtgaaaagttttccttaaccctattaatggcttatctagggttagaatccaaaggattgttttgctcttgtagttagctatctactggttttttgtggtatacaccgtacttgaccaatgtggtgaggtcttttgcttctctaactgtatacttctcataatttcaggtgacagtgaaaaccatttaaattcgttacttgtgagcctccttagaagattatgggtgatttagagaacttgcttttggaagctgctgggagaacaaattcagcagggaggagtcgtcatcctccatcatcgaggagacgtgagggttcttactctgatggtagtagcgattcaagggatgattctgatgaagatcgtggctatgctagtagaaaaccctctgggtctcaagttcctttgaagaagagattggaggcagagagagaagatcgagctgctcgagttgaaggtggttatggtgatggaccatctgatcgtgaaggtgacagcagcgaggagtctgattttggagatgacctttacaagaatgaggaagacaggcagaagcttgctggaatgactgagtttcagagagagatgattctctctgaacgtgctgataagaaaggtgataagaacttcactgagaaacttaggtccaagagagaaagtgagaaaaccacctgtttctaa

SEQ ID NO: 28647 - DNA, 1381 bp, Arabidopsis thaliana columbia
cctacgaataattaagtgtgattagttgtttgattagtagagttttgcatatatatatgatgaatgcatgatagtatgtgagtctgttttcatgttagttagtctttaattagatgtctagcattagtcgaatcatgagaatcccgtctgtatgttgtgcatcacgtgtaactccgttccgttatggcatacgaaggccttagggctggatcgctaccgactgggcgctacatgacgatgtagtctaaaggaatgttatgtctcttatagactttgtgtctaaaagtatggaggcatgtccttgggagatcatggattcctagaaggccttacctaggttgatagaagcatgcttgcattagttgtccgctgcatattaggaaattcgagtctgcatgcattctgcatggtgcattatattttgcttgtgttgtatgttgcgtgttatctttgtttatgtcttgcttgttaggtagtattattgttacgtgttgttgctgcttagggggtaaggaagggtattacgataacactatatagatccggggttcactaagtaatgctagattacttatgacgctacttatctttttcaggaaaacttagttgaccaaccttgtagagggtgctcgtgacttaggacgaaccaatgtaggttttacggctttttgtaaattcttactaagtatattatatatggttttcaaagaggatctgaaaactatatacgttttgctaaccatttctcgtatgatatatatatatatatatatatataacactcggatttctaaaatttatatgggtatactgactgatatttgtcttttccggactatcaccactcgcgtccgcggtacgggttgaaaagccttagcacacgggcgggaggctggactcttgcggttggacgactcgggcgaacgaattcgtttcggaaacctgggttggccgactacgggcgttcaacgtgacactcctatttcgtttatgtttttatagcgggataggggtgttacagatgatgtctccatattattgttaaacgggtttaatccaagtggtttgatctctttgttgccctttaactttggtttcctggaagggacaataacaattggcatagccggctttcttttttttgcgaagtgaagctaatcttctcgtcttccacttctatccgattgattgctcggaataaagcaggtaaactatggaaaaacttttaaattccatcgaatgaacacatttttccaagagctagaacttggagaaatctcttctcgatggaatctaattttgtgaagagcaaactcaacacttagattccaccaattggaattcacatctccatgaaggtgaatagcattggaaggttata

SEQ ID NO: 28648 - DNA, 772 bp, Arabidopsis thaliana columbia
attagcagtctaaatgtggggaagagattgaacttcggactgtttctcacacaaaattttgtctccaaaaaaaatccatttcctatgaaataggaacaagacaagtctgttgtccaatgaaatcggagtgaatttttagattttgtttcttcttctttagattcttagaaactggtttatgtttttttttggaaacaaaaattattgtttatttttaggacaaaattggtctgatcaatttgctttgctgtcatttctttttacacttgattgcgtcggcgggtttttttttttcctttttggaagtaccaaaattagaatactgtaacaaactcccctaaaatgtattaatgcatgcttttcatgcaagaaaataatgatttttatgtgatcaaatccctgataacatcatacgatctcatcatatatatagtggtactggtaaaatctgtaattccaaaagttaagtaaaatagtaagaaactaacttaagaaagtgtgtgttactccacgtttcaagaaaagaaaaatgtcttatatactccaatcttcatgcatggctactaagacagtcgcgtgtcaatcggtcattctcatgcctaatactaatccatatatataaataatatatgaaccagagagaagatctcttgaaactctttcgattacaaatatttgagttcaaacttattctttcaccaatactagccatttgcagataagacaaatagaaatcgagtcgaatctttcttgcttgagtggtagaagattc

SEQ ID NO: 28649 - DNA, 848 bp, Arabidopsis thaliana columbia
aaccgacgaggttagattttgacgtcagttcacaaaaaaactaaccgcggacagtagtgaagacggaggtgagacttggcgcgtcaagttggtctgcaagagtttcaaaatttaaatttaaagaatcattgtattttgagcgtttaatatttatcgtttacaaattatatactttttttttaattaataagctaatccaattacacattaggcaaactaaatcctaaaaagaaaagggagctagaatttttgttatttacatcaatcggagcaaaactagactatgttgtttagtatatatatatttgtatcagtctatggacttaaatagaatgcatgttgttcactcaataatcattgcatatattctgttgacatttacttcttggcatgtacactcaccccaaccattcatttaatgcaattgacatatatatttggaaagggaaattgtttgtatcatataacaaaagcattagacatgcaaaccctggaaaaagaaagtgacaacagaagacattgaagattgagacataagccctatatagaccttattcatgcatacgcaagcaaacgtaaatggtcatgattacaaaacatataacaaaagggaaacacactgtaaccgaacatagagtatgtatagagtgtggaatcagttaagaagaccaaagccggcagggatgatactgatgatgttgaggaggccggtgagactattgccgatcatggctaaccgtgagacgaggttgccaacggaagggaggttggcgttgcaggtggagagacgcgtcgtgacgacgaccgcacaatccgagagaagtgtggaaagtaacatctgaattgag

SEQ ID NO: 28650 - DNA, 992 bp, Arabidopsis thaliana columbia
ttcatgcatacgcaaacaaacgtaaatggtcatgacacaaaacatatatagagaagggaaacacactgtaaccgaacattaattatgcttatagtttggttttagttagattgtggggataaaaccggttgggaggatagcgactatgttgaggaggccggagacgatactgccgacgagatttaactgggagatcagttgtccggtggaagggagggtggcgtcgcagctggagcgaggggttgggacgacgatacgacaatcgttgaggagtgtgggaagggatatctgaattccgtttgtagaaaacgtgaataatccggcaatgttcgtaattgtttctgctacgactctgtttaggtttccacactggagctggacgaccgcatctgttatttgcaccattaaattagtatgtcaacaaagagatcataaatattatctttttgtgaatattcgtcattaagataaatatgatttcgtgaatctttttattagttcgtatatatagtataggttaagaatggacaactaactagcgaaacgcggggccggagtgccattgagaggggcgccattgatggtgcaaaagagaaccccattgataatggggacattgataccaccaagaccactctgagcgttactcattggagacaccacaatgagacacaacaagaccaatgagaaggttatgtgtttcttgataactgccatcttttttggattacttgtatatgaaactatagagtagatagcaaatatttgtttgtgttgctttgggtttggatgtgataaagtactgtcttatgcagctctatttatagaacaagttttatagatatctcccctcctatttactttgctctagttatatctttagatgattcgtttactttttttatcaccttattgtgtttatatacttaagtgaaaacgtccatagggtttagtagtgacccggatcctaggatgtaatttcaatggtgtgc

SEQ ID NO: 28651 - DNA, 952 bp, Arabidopsis thaliana
tatttttatgggacatatgtagaggaggctgaagtatatggtgaacttgaagatgagaaagtgcgtacttttgagtcaattgttgaccacgatgccgacgattcttgatattgatgaagattgaagacacatcttgagttgagtttgagattcatgttttcagcattcagtttaacactttaggttatgtttcagattttcagtttaatactttagtttatgtttcagactttcagcttttagtttaatactttagtttatgtttcagactttcagtttaatatttagtttatgtatcagtcagtttcagtttaatacttaagtttatgtttcagactttcagctttctgtttaatactttagtttatgtttcagactttcagctttcagtttaatactttagtttatgtttcagactttcagtttcagtttaatactttagtttatgtttcacactttcagtttcagtttaatactttagtttatgtttcagactttcagtttcagtttaatactttagtttatgtttcagactttcagctttcagtttaatactttagtttatgtttcagtctttcagctaggcgtgggcattcgggtacccgttcgggttcggttctttttttccgggtatcgggtctattcgggtaggaggttgagaaccattcgggtattctaaaaattcagttcggtttcggttcggtttcgggtcggttcggttattttagtaaaaatgtaaaaataaccaaaaatacccaaaatatttttgggttcgggttggattcgggttttttactcatatatacccaaatctacccgaaatacccgattgcccgtaaatatatttgttactttttatacaaatataaccaaatgtaaacaaaatacttaaattacctaaaagaaaactataacatttgttacttttatcccaaataggggatgagtcgac

SEQ ID NO: 28652 - DNA, 987 bp, Arabidopsis thaliana columbia
tataaatgggccctaagccaaagtccaagcacacttaaaagtcagcgaaacgcagatagtaattaattccagatctgtgaaaaatattaccactggcaatgagagcgcgtgctaataactcgctaaatttatttcaatttccgtggtctatatagtcagccaaatcatctaattttccaaatatgcaaaaaatcagcgcgtgaggagaatttcactgttacaaacagtttgcgtcttttctctattaccccattgtttcaatttttgttttttctttcacaaaattaaagtaatgccagagtgatactacgggaaattgcagcattttctgagtttcctaactgatcaaaaaaaaaaaaaaaaaaacttacatttgagagagaagaagagaaagcttgtagaaatggaaggccttatttgagaaagaagtgaataaaattgactcaagattgtaaagtctcacataggcataggctattattctctacaacattataattcagtaccacaaccttgcatatagggtggttgtgataggtcaggccgttttgagcttggaccaaactattgctctgcaacatccgagttcatacttatctcaaaccatgaggttagttagtataatgtggactaatgtatgtaggaagaagggagacaacaagagtgcaccaacacaatcaccaaaccagtagaagagagtattcgtagtgaagaagacatacaacatttaaaaccgcaaaataaacatcaaactccggatcatctgagaggtccatcaatgttaccaaaaagaaaacaagatggatcttggcctgggaatcaaaatataagcgtgtgctttccggattattctttccttttcctactttcctaagagttagctatattcacctgaaaaatctttgaatcagcttgtgcacaaaccagaagacgcctttcaaataaaaacgagctccctccacttgctttgtattaattatagtttgg

SEQ ID NO: 28653 - DNA, 510 bp, Arabidopsis thaliana columbia
gtgactactgacaatctaaatctgtacaaacagggcacctatagtggccaaatgtgatcgacaaagggtgcttacctcttgggcctcatattgtggagacagagcgcctgaagagtatgagatagaatttgccagcgtgcgacatcttaccccacgacagtttgtggagaagctgtcaaaggagctcagagtctgcggagttgtggcaggtgaactttaaaaagatctcaacccactcctttctgtaccatttcatgttgaaaacacacaaaataaattgtttgcaaaaacctttatccataggtgaaaattacagatttggatataaagcgtctggtgatgcctctgagctagtgagactgtgcgaggaatgtggtatcactgcttgcatcataaactctgtgatggacatgaagcaaggctcagcaaagagagactcaggggactcaaaagatagagggcaagtctcttctacacgtgtacgccaagctcttgcggcgggagatatga

SEQ ID NO: 28654 - DNA, 307 bp, Arabidopsis thaliana columbia
gaggagacccagctaagagagcttggaggaagagttccactctacaagacaaagaagatagatactctgactccacaagactctccacacagggtttaccgagttgaccctctacgtccttcattcactgggtttcctcatttatgttgtcacaccaaatcatcagtatccaaatactatagtggtatttaacacgaattgttgtacctcgaagagatattttgccattctacttgatttgattgacttttcacatagtttaccacgcaggacacaatatttaccggtagaacaacgtattatttta

SEQ ID NO: 28655 - DNA, 540 bp, Arabidopsis thaliana columbia
tggaaagtcattctataactttagtaacagacaaaatccaattctttaattgcaacacaaggcaatgttctcataatttattcccataaagattatataaaatcacatatagcttatatatgcatagttggattgctttgccttggcgtatctgctttgggtgataaagaatgaagctaagcgagtcaagaggcgaaacagagaagcacaggcgacaacaacatttcgagcacgagcttaagaacatgatctcttccttaacccacatgggaggagataaggcaggacctagccaatacgatgaagaggaagatggtatcagagtcatcacactttctggatccaaccttggagccaccatgaagaccgagcttgacaacaatcatggagacagagaccaaaatggcgaccacgagcttgatttcctaagcacttatgttaatagcaacttccaagctgtgaacaactcgattatgataggggccaagtacgagactcatgatcctggcgttcatcttgacatttcgggcgatgtggaga

SEQ ID NO: 28656 - DNA, 411 bp, Arabidopsis thaliana columbia
ccttaccatctgctgggaaactccgtttacaggtcgatctggtatctggtcagttaccattaagctgcaatgatcttgtgtcccatccggtacagcacggatcgtacgcttacggcgctcaatgttcgcttagcagtcttggtagttgtcgggcgatcttgccttattgttgggctaattagcatgggtgttatgtgcaatgtgcattatcaaggagtcatcaccacagaattagtcttcggtctcaccgctcaggtgatttcacgactagctaaagtttgtagctttatcctacctttcgagctgtcattgtactacttgcttaaggtgtaagacagctgttataccgtaatggacagagtatcagatcatagtaaacgacagattgaggtagctctgtgtaaacaagcg

SEQ ID NO: 28657 - DNA, 326 bp, Arabidopsis thaliana columbia
taattataaaagtaaaaaaaataaataaaaaaaggaatataaataaaaaaaaaaagaaatagggtagaaaatttaattttattaaacaaaactattgtaaaggttaaaattaaaataagtcttggatgattaggtggaagaaagagaagctgatgtggagtaaaaaaatagatgttgaataagtaaaccattgtagatagtcttagtaactctattgtgactatttgcagtcttaaattagagactaacttgagacgactataataatctcacattcgaaactattatcaaatcgtcacaatatagcaacttatatgtagtaccga

SEQ ID NO: 28658 - DNA, 541 bp, Arabidopsis thaliana columbia
gcaatgtgcaatgggtaaacactaaaacttaaataaatgataaccgtaattttaaataaaaaaacaaaattaaatttttgaatcaataactgtaattaggcctgggcataataaccggacccgatacccaaaccgatacccaaactgaaaaagctgggttggggcgggttagggtaaaaggatattacctcattgggtttggttttggttaacccgtgggttcgggttcgggtagggtattactcattacccattccgggtacccatacacccgattcttgtgcttatatagatatccctatatatcatatataacctatacacctatacaccactacttactttttgtcgattcagttttcttcacgaatcccttgaatatcggcttctcttgttaaattctctttgaaccatattctatcaaactggaaacccttgtcgaaacactctcgacgacctcaccgtcaccgacgatcctgttaatcccaccacagacagctcaatcgcgaaatctttctaaggtaagtacgttcatgcaatt

SEQ ID NO: 28659 - DNA, 896 bp, Arabidopsis thaliana columbia
tcccaacccaacatttcaaaaaaacaaaaaaaaacatgaagtggatttttataagttttgatttcatgaaaatgacttgtatacttttatgaacaatctacatatacatttttgcagccattttgtgaaataaatcctagagttggaactcacttacaagttacaaggaatgccattagcattaattattatcaataaactaatattcctaattactagcatttccttatctaatatattttcataaattctaattacttcaaagaagagaaagtttagcacattattaatattatactttattaaaagataaatattatagttatctataatttatctcacattttagaatatttaacggaaaacgtttacaatatttataatatggaaaatcttacaaaattaaataattatttgaaagaactttgaattgatttgaattataatttttttaataagtgtattattaaaaaaaatgtttaatttcaccgaacgagataagatggtaggatgggtttataataatatatcatatgaactttataaaaattaaataaccatttgaaagaaaacttttaaattgatttgaattatatatttttatattaaagtattattaaaacaaaaataaccaaataatgtttaatttcactgaacggggttagatggtaggacgggtttgggtcgatagtaatacgagacgatataccacgggtgaaatccattagatatgtttaatttcattgaacatgattagatggtatgacgggtttgggttgatagtaatacaagacggtatactaaaggtgaaatcctagatataacaattaagatacaattacattatctaaaacacaaaacaaaacaaacaatattaatacaaaaatatataattt

SEQ ID NO: 28660 - DNA, 489 bp, Arabidopsis thaliana columbia
gagcataagttctaaaatgtcaacatggtatcagagccaccattggcccaacaagaaaatttccacaaaaatggtttccacttttgtggcccgtacaagtggcatgtctcgtagtatttctgagatgttgggcttgggctgttttccgttggaccgtttcccacccacatctcgaaaaggtccattagaatgtcccacatcgcttgggattaagatctttgggcattatagaaaggatgtggcaatccttaactcttgagctagcttttgggttaagttatgccacattcctaatatggtattaaagcataagttaagaaatgtcaacatggtatcggagccaaacagttcatcgacttttttttattctctctagcttctagcctccgctcataccgcaatattgaaacgatgagctttgtgccttctctgaaaaagcgatggtgagcgtgaggttcacatcttaggagcagatttcagagacaaggg

SEQ ID NO: 28661 - DNA, 1230 bp, Arabidopsis thaliana columbia
gatgctccggttacatacctttgtggttgtaacgcgggagatcacgggagtgtgtgtttggcgttgggtttgatgttttgcatatcgggcccttttaaaaacttaataaaacaggagtcttagttgcatgtgcatatttttggtagatgcttcggcaagctaccttttgttgttattctctgttgcgtgtttcgtattatgatagtgggatggggaactaatatctgttgcaggtagaccgagctcactaagtaatcttagatttcttatgactccattttgttttgcaggaaaccttagtgggaaccattagagggatgctcaagacgtaggaaagccggtatatagtttgttgttttttgcaaaatttaatgattatgatttttgttggatttgagcgtgtatgctcaagggcccattgttgaaacgttttggatacttggttgtctgagaaatttatatattataaaagattattttcatataaagagtgtgtttcatgcgatattagtcttgtcgggactgacataactcacgatcatggcaagggttgaaaagcctaaaccgcgttcgtgagggatgttcatgtggataatctggctaagggtctaaagccatttggaacctaagttgggttgtccgtgtgagttatcaatgtggcgtttccgggttgcccttggcttgtcaggccatagagcgattcgagggcgttttggtatcagagcatggttcatgatgctcacgggacacacgttttctaaaagttttatcgagtaaatgagtcgcaaaagcaactaggtaaacttgtatgtcctgagttagtggggaatgggttaggtattgcccttgttgttgttgtagttgtacgtttggattggattgagaatggatggtcgtgggggaccgcaaccaagatttaaagtgttgaagaatcctggtcgagctcagtaacaagggcttgtaactcaagtgagagcaaaaggggaagcaggtaagttgtttcggagaaaactaagaaatagtgaaggagaagttgaggagatttttagagaaagagtaagagccaaggtgggtgatgagatgcgagttgcagaggacaagagccgaaggtgtaaagatcatttctaaggaaggaggaaaacggaagatgaatgaaatcatttggaagaatgatgagcaagacttattaatcggagaaaggcatgagggaagtgatgaagctgagaagaa

SEQ ID NO: 28662 - DNA, 598 bp, Arabidopsis thaliana columbia
tttccctttggtacaccagtaattttgcagaagcaacgcaaaacatcctatttccggcatttcctagtgttcgtcttcccactatggtcatccactatggttacctataagacaagtagaatcatgagtaatctttgattactcaatgagctgggtctatgcacaaataaatctctagggtttaatcaactccataagtaaacttagccaccagagatcacataacacgtaataaacgtattatcatatacttataataatacaagaatatgcagccaactagacacatgaatgaaccttgggcccaacatactgccaaccttaccaaaaaggtgcagcacaacatcagcacaaactcccgcatacgtgtatacgtgttctccacacgtatgctatcacacacacgtacgtgcacacccacaccacacgtacatacacaactgtgaacacccgagctatagcaacaaaggcttataaccagaacatcactttaatgcatcgtcatgcattacccaacatacgcttcgagtcttgtgccatcatgtaagtgaccacttaggatcaagacttactcacacaatcacaacacaaataggaa

SEQ ID NO: 28663 - DNA, 517 bp, Arabidopsis thaliana columbia
cgtaactaaacctgctaaactaaaccgtacatttcaacagttactaagagagaagcgcaagggcagaagcgtcattttgcaggcgaaaagataaatggtgaaaaccacatttgattttgacaatccatggaaataaaacatggtcaacaggtgtggcctgcaatttaccctaaaataaaacaacaacgggaaaatgctgaaaagtcaaataagaaccaataatatgtgacgtaatttcctttatctgtcattattttcttactactgtaggatgaacatgtatgctattaataacctataccatgcaatctatgaactcggaaacaagcattcaaaaaaactcgtaacagcactttcaaaaatattagagttatattggactcaactatccaccttattttaagcgttggcatctaagttaaccgaaaagaatagtgggggagtagagattgaccttctctcaagatgttattaatgtagatgggtttgtagggataagtgaaatagctcatgttac

SEQ ID NO: 28664 - DNA, 652 bp, Arabidopsis thaliana columbia
gctcttctggcgttctcaagtatcttaacctcaccaccatctccctcattcagatcctagggttcaaagatcatgatgggatttaccgaagagatcaaaaccttttgctttgggtttcaaagctatccttattcgactatagaaccatagtctcccaaatcattgttattgcactgtcttgggtaactcatctcactccactgagaagcatagcattgattccttcttcaacttcaaaaatgtctatcgactatgactactttaacgtcctccgattctgtcgaggatgagctctcgattcaccgtgatctcacttgtctcaatgtgcctccaagcccttgtcgcatagctctcatggtttcaaaatcgatgaacctctcttttctttttatggcattggggaatgcttgttgttctattgttctaaactttggtttgtttaaacctttctatgtgtatttgttcttctttgaatgaatgaaaacatggtgtttgaccaaaaaaaaaaatattgaattaagtgttaaaaaaaaattattatatcaaaatgagaaatgagaacttagagatattaaacgtcgtatgaaggttacaaaccctggtgtatcagaatattaaatctgtgtttaaccactagactaaggtaacatat

SEQ ID NO: 28665 - DNA, 203 bp, Arabidopsis thaliana columbia
ttccaatctgctggagctcacacagctttgactccttccaactctctcatgatgaaactcgctttttcttggaggagttgggtagtttcggctttctgctgtttctgcagaatacattgtctcttcctcgctgctgtatccatgattgttatatacatagtgagctgctgctggcggtgaacttgagatgacctcactgagag

SEQ ID NO: 28666 - DNA, 568 bp, Arabidopsis thaliana columbia
ttaccatcatctgattataatatgaagagttcaccatcatttacttttcaaaatattaggatagcaaataacaatttctcacccaaaaagttgaaaagaaatttatgtcgttcaactttttttttttacaaaactcttctttcctaattagattaaccaaaataaagaatgtttgacctagttttcctaattaaagtaacacaaagattttgacccaaaaaaaaacgtctttgagcgctcgttttcttgtcgacgagagagctcttaagacagaacacaaagataaaaagagaaacccttgttccaataaaataaaaagaagtgacacatcgcgtctcttaaattttaatagacgacgacggccacttcttgtccgaatcgtacgtcaattcttcttccatctctctcgcaccataacatttattcttcagatcaccagcgaccgagcgaaagaaacgacacttcttcgccgttttcgtcacatgcagttttggggatagccgttgtgagtgattaagccaacagataaagagaaagatgatgattaaggtgaagaaggagacgatga

SEQ ID NO: 28667 - DNA, 389 bp, Arabidopsis thaliana columbia
ctaagcaagctgttttcgagtcggtaatagggtatagacttggcagaccttattaggctgctctagaattcaaccaaggactctatcttaggctccgttggtcctctgttccttacttgtgttagattcagagaggactggttcttatcagcttatctgatgagaaaaccaactaacatagtacaccttgctaattgtcatcttcaagcttaagcaagtcctttagttgaactggaatgtagtattactgaactggaatgactacatcaacggtactattgttgaactggaatgaagcggtatcatcggttctaggtttgaattcgtctgaatctgagtacttgtaatgtatggatttgcttagacatgtcgctgatagaattgactca

SEQ ID NO: 28668 - DNA, 530 bp, Arabidopsis thaliana columbia
tgtgagatcattaagaaaagggtcttaatcataaatttaaaagtggactcttatccgcaagcctatcttatgtatatggcactggcaccgtccacaaaggtgtctatcatcctttcaagtggaccatccttttcctttaaggtaataactctgtgtgactgagatctacaaacacatgttacacacttcacagtccttataaagtaaatttacttattattaagaaaataagattttgtaacttttttcctcttaaaacaatggacaaatatgaatacaaatccatatgtcactattatctatatttacacaatttattcgattttttgtatgttgtcttatctcatcggaaattttcaaactagttaaccatcggaaaaaatcaagacgcacggatatataaattacatattcataaatcagacatttgacaatccgatagaaattgtctcataaagagaaaaagaacacagacaataggaaatgaaatgagcagagataattcataagaatgttttagaaaagaaatt

SEQ ID NO: 28669 - DNA, 510 bp, Arabidopsis thaliana columbia
ttttcactccggctttgtgcccggacaaggtccgttccttttccagcatcgatcggctttcatggcggtggtggctggcttgagagcggttttcctttgcttcgatttaatcattttggtttttaggaataataccctcgactttatttaaattcaagttcaaatataattttttcagccataagtccggttccttttccagcatcgatcatgatcatattttttcgacgttgatttcgttcaccagaatcagagtccaagcaggtagaagacgatgaaaaagattccaacatgtggcattgttatagcctaatagcttgtcacgtttgtgtagagaagagaatctttcttttttttttcgatattgaagactgggctttattgggctttcatgtttgtaaactcaatgtacttatagttgaaacaaaaaaggaatttattataagaaaaaaaaaaagatgttgttgtgtccgttcaactaataaaagcccaagtactttttttttttgt

SEQ ID NO: 28670 - DNA, 863 bp, Arabidopsis thaliana columbia
aagaaagaaagtcgtgtgcagcaatggtggtggacagtgacggagaagttggagagaatttagggtttgtgagcgaaattagaagtcgtcgtcgtctgtgtcttcgtctgagcgaacaggttcaccggaaaatcatctgcgtcgacgtctgagcgaacagagtcaccggaaaatctgaagaggatgatgtcgccggattcgtcttctacaacaaccagtaattagcagttttttagtggattaggtttttacgcgaaaggaaaagtcttcaaaagtcaaaaaggtaaagaaactgcaaattcgaggagtggtttggttgggatctctttggttaattcgggtttggtttaaagaaaaccggttagggtaatagagtaactttgccaaggcaaagtgcctgatgattttaaagtgtcgaaacacgtctaaacttatgaaaaagtgtttgtctatgcaatattctcttttttgaaagtatagttgaactcttagtcgcgagaatttcaatttaacatattgtatatgtaaatattttataaaattgatagtagcaaaaacagacaaaaactggttataatgtgtattattttaaacttcacaagatgaattgcatttgttggaagtaaaaggtaaaattgtaaaaaatggaagaatgagaggattttttttgcacaaaacgctaacattaaataaagttaatttctgttttaaaaaggatattacataaacttagtcggtaatatactaatacaataaaacctctataaattaatactcgataaattaataatctctataaattaataaattcttccagtcccgagttgggacaagtgtaaaaagtaatacaaatcgataaatta

SEQ ID NO: 28671 - DNA, 912 bp, Arabidopsis thaliana columbia
tataccgcttaatatattattcatatataaataatactaactaaaacaaaatctctaactttcttaacgaaaatataaacttgcggtaaactatgtggaaaggctgataatataataacacgagggaggacggacactttgtggaaaaagtaacaaactttcggcaagcaatatctaagtggcaaaaatatttgacattgtatgtaatatatttctatttttaccgttattagttatgatttatatataggcttagaatctttttaatatttttagagtctttttagaatttttagaattttttcacgtgtttaatagactaagacaagaatggagataaagagacattttagaacaaaagctgaagaaacgaagctgaaggacgaattcaattcaaaatcaagttgagagtgttgatctacacactcttggtgtcgatcgacaccaattgcggcccataaaaaatccaagacggtgtcgatcgacaccagttgcggcccataaaatgtccaagaaggtttagcgtttgaagaattggaagtttgccccaaaagatttctctattaacattatcggtccatgcacgtatagaacaaatatagttttcaaggttactgtttagacctaatctttggagactaagcaagtcatacattgaaaatcctttttatcagagtctcgttaaagatttcaataccttacagtgaagagatcttttctaaactcttttctacttttgatttactttatgctttcttattcaaacatgttatatgtttcgatgatcgtgtctgagtagtcttgttagggtttgggtttctcattagggttgtagatgatttagtagatcgcccacctgttaggattcttcatctttggttgttcttaatgctagttctagagtagctaact

SEQ ID NO: 28672 - DNA, 433 bp, Arabidopsis thaliana columbia
gagacgaaaaagacgaccgagaagtagagagagaacaaaatcgctctctgccctcccttctctagtgtcccgtccctaacgaatgctgcgtctaacgccgttttgctactgggcaggactcaatctggaccgtcggatctgatccctcgaattaaaatcgaatgcaaatacttcggtgcataaaaataatatcctgggcttataatgtaaagcccaatgaactttttaatgtgcctttattgggtctacggatgactcaacacggcacgctgtgaaagctcgaatcgcaggaacggcacgcgcttttttccttcgaaaacaatttcttctccttcttcttcaattgatggtttgatttacacatccttcttcttccagttccatgtcgcatacgtacacagattgacagcgaactagttagctcagattttgg

SEQ ID NO: 28673 - DNA, 475 bp, Arabidopsis thaliana columbia
cgccagtgccgggaagagcccagcttgaaaatcggaacatgaatccctatgctaggcccattttaagttttaaatgtattttgaagtaatgatgaaaaatacccacttttaaaaaagagacagggtcacaccatatagatcaggcttgggactcaaactcatagagctctgtttgcctctcaggtgctgggactaaaggtggtcaactggtaaattcgtccaaggctaaatacgggcgagagacgatagcgaacaagtaccgcgaggtaaagatgaaaaggactttgaaaagagagtcaaagagtgcttgaaattgtcgggagggaagcggatgggggccggcgatgcgtcctggtcggatgcggaacggagcaatccggtccgccgatcgattcggggcgtggaccgacgcggattacggtggcggcctaagctcgggcttttgatacgcttgtggagacgtcgctgccgtgat

SEQ ID NO: 28674 - DNA, 534 bp, Arabidopsis thaliana columbia
tgggaacttgaccaacggaggtcgatggaagtctcatttatgctggatcattcctaattcatagcttatggttgaggcaggttataggagtgctgcggcgaactcccgttccttgagccggaagttaaaaaggcgaaaagctacagaacccttttggaagcggtgttgcctatctttaagagcgtcggaggtgatataactgggagactcttgatgagatgttggcctatctggaatacttcccagttgcgagaccaacggagctgaacaccgtcaacaacgcacctacaacccatctcaagagcttggacacgagggagaaggttggtgcctggatcaaacagtggtgcatccaaaacgcaagccatgtagctttttgtttcgggttctacatggccattgcgaagaagggtgaccagttaccctaaagacgtcctgcgctttgagggaactcagaagacaatttgaactttttttctttagcactcatagaagaagagcaaagagaccaaacggataatatgaagtctttac

SEQ ID NO: 28675 - DNA, 629 bp, Arabidopsis thaliana columbia
tatgcagtaaaaaatgtgtacgttaatatgtcctttgattaatatattacatttggttatacacggtacgtcaacacatttctagttcgcaatagggaattctacgttcttccacatatagtatttcaaatatatatatagactgaatcttccttcttccaatcaacttatattctcacgaataatagaaattaatttcaactatatatgatgatgtaacttggaagaattaaggagatgatgtaacaatctagaagccttgatagtgtattataatgttatacataaataatgacaattgtaatatagttgttaatgctgcgtagtttttgtcatttgcgtttgtttggtatagtaatggctttgttcaaactttttttgtaccactttcggtccatgccagctcactttccattatctttcgtttgcataaatacaaatttcaaaaaggtagcttttcttagatgaaaaaaaaacagtatatatgttgctcagttcatgaacactgtatatgaaccaaatgtcgcttacgtatgcaaattgttcaattgaggaggcaaacaacaacaaaaaagatagtggacatgcgacttctttaagtcaaaccgtgtgtacgtggatatgatagt

SEQ ID NO: 28676 - DNA, 832 bp, Arabidopsis thaliana columbia
tcgactctagactcccccacttaaatgaaattcgtcctcgaattttggcggttactcctttgcatataaaattatttacttggagctctagcaaacaccacatccacatttacggtatactagccaacgacctttcattaaaaccttagcttactgtttttaacaaatcaacacttgttttctaaccacgtgtgtccttccgttgcactactttgatgactgcttaaaagaacatataacttgtccatctccatcgaactctagcgcataagcactgattactattagagcccaaagtagaaggattgcgaacaaaacaactacttaggcaaacaagacctccaaactaactatcattcaacatgttcgtacaggctcacatgtgctgaggcacttgaccttggtttccttcccattccttttttcaatagtttctacggctccttccccatcattgataatttaacatatttacatgtctatgaattagatggtttccatccgtcttaccttaaatatctctaagctcttattctccgataatactttcttccatatcctttctcgataaccttactctttagcttttcattgctatcttgaacactgattcttacagcttgacactttttaacaccatactaaagcgaagaaaacatgagaatccaaattacaattccagtatcaaaagaaatgcaattaagtcttcccaaaaagaactaagcagatatgtaaaactcaatcaacaaaagattactcaacgcaatcaaagaaatcaatcatcaagttcaagcaatacacataattaatcattcaaaatcttttttttttt

SEQ ID NO: 28677 - DNA, 467 bp, Arabidopsis thaliana columbia
cctgcgaatggctcattgatatatgtgattatgcattaactaatactttgtgtagatgacaatctttttatatgttacttttttcctgttcaatatagacttttattattcaatagacgtatgctatgcattcaagttgtttagaaaaaacaacagagaaattaatgtgtgaaaaatatatttgaagtcaattatatactttgaattttggggaatggtgttttctttgaataatttaaccacgagctaattgatcaatgaaagatgcatggggtccaattaacaattatacattcggtccaaaccaatcggaatttcctgaacccagatggtttcagaaaatttcaccagcggtttttaagaagtaccaaaataaaataaataaataattaaggaccaatggatacatatagcaactaagtttggactgtatgtcgagtttgatggatgcagtacatattgcaaaa

SEQ ID NO: 28678 - DNA, 551 bp, Arabidopsis thaliana columbia
cggagaagctacttctcttgggtatatcatggaagcatggtctctaactgctaggggacttttagttaagctaacaccgttcttagaccgcactgttcttcatgcacgtaaccctccctcctctgtttttccgcacactgagtaccaatcacccccatttcacaatcatccgatgaaatccctggcttacagatcaaatccggaatctgattctgctattgccactctcaagctcacacgtctccaactgaaagctcttaaagctagggcagagattgctgatagtaagttcagtacatatgaagttctggtggcgcatacctggcgttgtgcttcttttgcaaatgaaggtacatgttgatattgttggaaacactttctctggaagcttaaagcctaaactttctctagattatatgaactaagataatgcagaaatggttcagctcttggtcttatacacattgaacaacggttctcactttacacttttttcaccgcagacttaagtgaagaacattcgacgaggttgcatataataattgatggga

SEQ ID NO: 28679 - DNA, 576 bp, Arabidopsis thaliana columbia
caagaaaatggagaggagagttcaggggagagatagtagtagtatgtcgagatcaaaccgttcttttggaagagggaagtatagtttatcggttttgaaagaagtgactgaagggaagaaggaggaacttgcttctgttaaagtagagatcttcagggtcatgacagtaatggatgcgttgaggaatgagattatccgagccagggatgaaacagcttgccttggaaaaatcttgagggaagatgatgttaagattgagaaactcaactcaaagattcttatcgaaaaatcgaagttggaagtggtatctatcgccgaagaaaggattagctctcttgctgagaatttggttggttcgcttgagaagataaagaaaagtagaaatgctgcaaagaaagaggagttccttttcaaagaagagaagacggttacaaaggcggaaacacagaaaaccaaacttgatatagataaaaaggaaagcgaactgaattcaaagttggatgagcttgaaaaagtgaagccactgaggctttagtgcttgagaagcttgaatctttagtagaagcatgatggaga

SEQ ID NO: 28680 - DNA, 539 bp, Arabidopsis thaliana columbia
aaatcaagtataaccactttcccttttaaatcctgcacaaaaaattataagagttactaagaagcatatgactccgtttgttcctcaagagttcacatgcaaaatatagatttggtatttgctgatgcaaagcaatttatctaatgtcttccggttcctagagctgaaaccaacagcctcttaattacttcgaaaaactaatcctcaacaggtgttcagtaaataagcaaaaatctatgttatcaactcttcacataactttaaacgagaatttacccggcgaaactggagaggggcagtgtttagccagtcgagtttagatgggaattctggcacagttgtagctgtttgcctacaaataaaacaatagaaacagagtaacatccacatcaaaacagaagatcatccacatttctttttcccgctagtgatattccatatttctgtaatctattgtatatgataatctctttttaacgagggaattccgaataacaaactattgccttcattgtttgaaattgaataattacaaatag

SEQ ID NO: 28681 - DNA, 605 bp, Arabidopsis thaliana columbia
cgcaaacaggtaaagattcatcaaaacccttatattagctcggtctggtcttcaccagtcataactgagttcaattctaatttgccctcaggttgagatgttggggagaggttcaggaccaaaagtgttgaatgaaaggcctcaagattctagcccagaagccgatcccgagagctcttcatcagaagaggatgagaatgacaacgaggagcaccattccgacacttccttgcggttggggtaaactgcaaaacaaagccctaacttctgttacaagcttttattgttactgagcattctacaaacttgttggtttgatctttcttaggttgtcgtcgacggggtattgcacaaagagaaagaagccgaagatcgaactggtctgcgataactctgggagtcaagtggcttctgattgatggaatcgattatttttctaattctggttgtttaggggtctctatgtgtcttcttgtttctggctgttcttttgcttttattcatctcaagtagagtttctttaatgtttaggtggacattttccataatcaagaagggatttgatcaacaataacattagagttcttagttaaagcttaaagttg

SEQ ID NO: 28682 - DNA, 542 bp, Arabidopsis thaliana columbia
gatctagacgaaagaaaaccagacatcagtaaatgggtaagtggagttcaggcaatgtgtcttacaattagccaattacctatgctccctgtgagctatcaagtcctcaatgggacctgacgcaagaacttcatgctgacctgacgatagtaacaaaaacacaaaactgtaaactatataactcctgcataattctgtatttgagaacttatctctgtattaacttgtaagaactaagaacaaatagaacagcataaaaccttacctttacgagccattatagaatcccataacctagttgcctttgaaactagatgagaattctgactggagctagacacaaggtcatcccacacttctccttcctgcttcactttgtttctcaaatcgttaagtttctctagttcctgttgaaggtaagcctgatgccaaagaaatagaaaatgaaatgcatcaataaaagccataataaccagacaagaaaatggagtacctctcaccaaaaaataacgtcttacctcttcagcacagagaccacggaa

SEQ ID NO: 28683 - DNA, 507 bp, Arabidopsis thaliana columbia
gatgcacataactgccaataaaatgattcaactactaattattgcaagcagtacagccactacgaaagcatcaaatcaaacagtatgaatacatattgctacacaacaaacaagtaaaacagatacctacaaggaaaaaagaaacttgtctgtgattcttttcagcagcaagttgcgcaggggttagcccagtcttgtcagtaatcatcaaatcctctttctttccagcctgcaccaagacagtgcaagcctccaaattacctcggatggcagcccaatgcagaggagtgcaacctgataacagaatcaatataacggagaagatgttagaaacgtatagttaatctaagaaaataaacaaagaagatttaaaaaaaaaatatgtttgtaacaccttctttgtcttgtcgtcctctatatgcatctagaaataaaagtaggcgaatggaatctgcaaaacctttatatgcagccttgaatttctcaaattatgagaagaatataaag

SEQ ID NO: 28684 - DNA, 477 bp, Arabidopsis thaliana columbia
tattattaatatactgttttaatagggattaaaactccagttttttaacaattatctcatggattcgtggtatagggttacctaataacaattataaactgtaaaataaaaatatcttataacattaaaatttataagttttaatatatattactttaaaaaaataaatcgtcccgcgctatactgcggatgaaaatctagtatactttatagagatagcgtcattttttatttttttcttaacgttagatagcaaatctgaaagagcaatatagagtatagtcgctttttttctttttcagtggaatttagatattgtgtagtcgcgcgtggggtaaaaaaggaaagattagagatccccaggaatgctggaacgacaaagttttatttttacattgaaccaatcaaaactaatgtcttctttgtgtgtaagcacaaggtgttcgacgaaatgcctaactgagagatatcaattta

SEQ ID NO: 28685 - DNA, 509 bp, Arabidopsis thaliana columbia
tttttaaagtacgtaatacgtataatatcataattcattcggcatgggcggatataaaccgggcggttcggatactccgacccggcggtgttatatttggtcacgattatttcacggcggcggataatagaggagtgaggagagccgtgaatctgttcgcagagattaaccggttaaaggtcaaaaccgatggtcaacattgggttattgattcggtcaaagtaacctgattccctttttcccataaggaatgaaaaaattcgatgtataaataataagaaaatgtgtaatattgcatagtcaattcatattttttttccatcttttgaaaattaatggatttgaggtgtttgattgtgtaatgagaaacgatatttgattgatcaggtgaaactaaaaaaacatcatttttcctgtcgttacttcaaattgatgaagtgttccatggaagtgtattttcagaatattatttttttatgtgacaaaggtaattaatagagggacaagat

SEQ ID NO: 28686 - DNA, 602 bp, Arabidopsis thaliana columbia
tgcttctcaaagctataattggtgtagccaaagtccgtatgagtctttgggtttgtatgttgtagcatggaacactattatcttttaggaacagataacactgtatttactcatgttactcatatgtttatcatcatttagcttagtgttcactcattgcttcatatcattttgcaccacatttagcttattttgcacacttaggcatttaggatcatattgcatacatattgcatgtttttgtatgtttttaggtgtagaaggaggatacatggaaatcactcgaccctatactctatcaaaccaggagggaagcagcagggcaattcactcgaccattcactcgatccaggcagctacataggaagcagtagacaccactcgaccccctactcaatcctctactcgcccaagtactcgaccaaaagcaacccattccacaagacttgttgatcattcaaagcgccttcagattcttttcattccacactcaaccagacagcagagcataagaagaggagaggaagaagtaactactcgaccaattgatcattcaaagcagactttgtagcacctttttactcgatccccaagatcgagca

SEQ ID NO: 28687 - DNA, 929 bp, Arabidopsis thaliana columbia
tactgcatatccgcaaacaccaccgtcaccttagcctaattgaagatgaagaacaactctcttctcctttctcctttagacaagttactagtttgcttccaagctcatactattgaacaccatatatcttggactccatcaaccatgaactaaaacactgagtcttaaaggctcctgcaaagcttcagatcttccgagctcgtttgcgccatcaaacaataaaactcgttacgatttactctatataaatctgtctcggattcatacgcataagtcaatgactaaccgttagaaacgtaattccaccgttgaatatgtattcagtagtatcacaaagctctccaccaaaattagttccgatcggcattgttacggatctccaaacgttggctcaaagaagctaatacaaaactgctttctaggattacacataattctccagttacttgtcctgaaagaaacgcatataagttcttaaatataaacccgattcaagatccgtaaactgctgttgattctttacagtgtgatatttccagggacaccttatttgtgatctgaatcactctggtatgtcggatattcgccccgcaagacaacttcttaaaattgtcttccccccttttctttctctccttgcttatgtctttcttcgcctcagctcatctggtccaatcatcaccatcttcgattctccttaatatcacaaccaattctccttttcctaatgatctacacgaaatctcctccatctcctctttccttttctttttctcttcttttctcttctccgatctaatatggcttattttctctgatggatatgttggccacaatctccacattatatctcctttggtggctcggtctgctacaaactcatcacgatctctctctcttctacttcacgatcgagattcatggtggtg

SEQ ID NO: 28688 - DNA, 1141 bp, Arabidopsis thaliana columbia
ccatctaattaaatgagttgggtcaactcataactcatttaaccctaaactcataactcatttaaccctaaactcatttgattatgagttgagttgggttacccattttgatacccctagatattatagttaaaaattaattttaaaaaattgatgatgtactaaattctgtcaacaaataccatccaaagtctaccataattaagtgtgaaaaacatagaattaagtggatttccgaaaacttttcttgcaaaacatctgatactacatttgatccaaacatattacatatctcttgctttcttctacgttttttcttttcctgatctttcaaatccagtgatcaaaatagattcaaaataacatcacatctttgtagctgcatgcacaaagtcgaatcttcatcctcgtgatgtttcaagtatggctaagaaaaaaaatagatttgtcattcctcatcaagaatcacaggtctcgttggtatcctttccaatgctttgaaagattctttttcgtaaggaggaggcaacaaacgttgtacatctgcaaatagatcttcacgtccagtcgcctctttgacagcagatgaatcgaggacatagtcgggtattgctggtaacacttcgtctaagaatgattgtaaggtctgcacaacataagaagtgagttaacacggtgacaagagtttgatagcaagtaaaaaagaagagtgtcagtgaaatcactaacggtgcagtgcaagagagcagcatcggttctacgtttccactggccatttccagactccgagtggaacaaattgatcaatggctgcagcaaagttgtgctcatgttataacgcttgtatcatcggaaatataacttaataacgagacttagaaagaccattaccctcactatatctcgaagatttggtcggccttttccatatttcccgagaacagactctccatatagtttatatttttcaagaacctattaatcagttaaagacaacaaaacaaatcacgatatttcagatcagatgttagttacagaatattttatttcagaaaatcaatctttctcaaaacctgtcgccttgtaatccactgcttggagatccgtaaactacagtatcgacgtgtccaaaatgtgcagg

SEQ ID NO: 28689 - DNA, 617 bp, Arabidopsis thaliana columbia
tagtaacgtccgccagtgtgctctaaaggtttaggggtgggattatgcttttgagttgctgtattttcaagagtgcatttcgggctagatatatctacttacaattttaataagtcactaattctaatcgacctcaatatgacctccgtgaagtgagctcttttagctcctttcccactgggcttactgtcagcgagtctatttagataagaccctgattcactttctgtgaaaccaggttatactttaccctgtccgctatggacatgtagaaggcactgagcacaactaagagaaaccagcgcgggaattctaagacatttccagagctaaaatcattagtagtcataaaaatattgagactagtagaagtcctccgtactctctaaccgccgctgcattgaccatgtcaatcgttgatgacaagcccccaaccccgccttcggttgctggggcagaatccaaaacaaacgagcgataactcgataagaaaatgtgacggctaaggtttcccccacaatcacgaaattcctaacctcaactgggctccctggatctgccacgaaaccgacaagaggatggatggtttacgcatagaacatctgaagcagcaggtt

SEQ ID NO: 28690 - DNA, 924 bp, Arabidopsis thaliana columbia
tccccgatacgtagttcctacatagctagtgggatccacgacaaatggatcataaagtcttcaaaaaagaatagatacgattgcattccatgtagtaacatatgcgatcataccagcactaatgcattggatcccatcagaactccgcagttaagcgtgcttgggcgagagtagtacgaggatgggtgacctcgaggaatgtcctcgtgttgcatccctcttttttttctggtttttctcttttttgtttttttaaaaatgtatgactctataacttttataccgtgaggccaaacttggcatgccataccttttcggaaagcccaaagagagctctccaatgaatgaggaaggaaaatggaattcttctattgtttttttttctactcaaaattttgaccttaatgtacattttcgggccttttcttgatctttgcaatattacgaggcaaaaattatatgtttggacattgtttttgaatattttgcatgtctcaaagctcttataaacaagatagattgcaatgcatgtagtaacggatgctatcatactagcactaatgcaccagatcccatcagaactccgcagttaagcgtgcttgaaaaagagttgtactagtatgggtgacctcccggaaagtcctcgtgttgcatccctcttttttttttttttggtttttctctttttttttgttaaaaatgtatgactttataactttaataccgtgaggccaaacttgacatgtgatacattttcggaaggcccaaagagaactctccgatgaatgaggaaggaaaatggtattcttctattggtttaactcctactcaaaattttgaccttaatgtactttttcgagacttttcgtaatctttgctttaatacggggcgaaaattatatgttcggacattgttttcgaata

SEQ ID NO: 28691 - DNA, 563 bp, Arabidopsis thaliana columbia
tttagcgttctggttgatgctacgactagcagcaatacgacttgccgatttagagttcatggtatgagtttgtaccggtagcataatccgttggccaaatatggcaacagcttctttaacagagctaaaaggacgagaagtgtcgacatgatgttcctccacttgattatttccttccatctcttctatatccatggaggaactatagatagagaagaatgtattgtatttcgtattgctggtttgttgggtggaatccgtttggtttctttgcttttacagcatattataggcagagactagatgactgttgtgtcaaggtgaagtcaagaccataccaagtcccttaaaagttgacttgccaactactttttgtttacttaaatcagttttaagtcttgtccaaatctctttacaacgtcagtattcgttaaaagtataaacttctaactgcatgaccaattataattttaaacttaaaaagtgtcattttgtagacaatgtttaaaatctcacaaacaagagaagacaaaccaaaataccaaagagactaaagaagacaa

SEQ ID NO: 28692 - DNA, 617 bp, Arabidopsis thaliana columbia
acaaatgcttttatcattactatgttagaaaacttagatttcgaatcatgccttgttcaatccctataaatggattattttcagtgagaaaaacataattcatatttctttcatccccatgtttattctatatttttagggtattttcttataaaatatgttattttattttatggatgtttgagtaccaaatacatgtttatttatcttattgtgttatatattgagaatggatggatttaggtactaataaattaaaattgtgtgtattttgtcaaattttgtgtggattcatttgatcaattattttataatgaaatataatagcataattttttcttttgtattgcatattgtaatctttaaagattatttgaaatggtattaaatattattttctagctttaatgtcgacgaacctttagagtaatgcttgcggcggtttgactgttataattccaaatataattcaagttattttatttgaatgtagttgattttatttcgcgagatttatttgtaagaagaaaagaattttaatcgattatggatgaaagcctaaaatttgtagaagtcatgctattaaaaggaattcatccttattaattgctagtgac

SEQ ID NO: 28693 - DNA, 546 bp, Arabidopsis thaliana columbia
tgctaaactcatgaaaaaccaaatttcaccaagcaaaaaatttgtgcatgttgttggtttaaactttaaaacaagaattaattgtaacaaaactcaaacacaagcaatatatagcaaaaaaggcactgcatcctatctgctaatatggacagagtggcaacagagggagaatctcatgataagcattcaatactcccatttttcacataaaatgttggatatgaataatagcaacagggtgccatacatttgaacaacacctcatcgcaattaccagtcttggattagatgatatgcatggtatatcactaacttcgacatgtttttgctatcggttcaattaatgaaaagttctagtggtatcttcagacctattcctaaaggccaaagaattgcataaccacaaagatattctttggcatagtaggaaaaatatatactatcatatacaatgtgcaaaaccgaaatactgtgagaaattcaatagacaggatttagatccatacctgtgtttgtatacatctccagtaactatatttccacagt

SEQ ID NO: 28694 - DNA, 562 bp, Arabidopsis thaliana columbia
cttcttacctagatatctttggttgagaccttgacggaagtttcttactcctagattgtttgttcctcaactgttttgtaggaaaaggtaaagtattatgatatagctactgagaagagggaagaatttcaccgagcaatgacagaatataccaagagaatggtaccaccgttttcttcatttttccttgtttttgcttaatatttattcacatcagtgggttcttcatttttccttgtttttgcttaatatttattcacatcagtgtcccactgatgcggtgataaaacattagtctgagcttttcattttactattttgcaggaatcaggtgcccacgatgaatcagagaccgactcagactattctgaatagattactttttagtttctaccacattagaaacattgttctaagccttctaggatgggtttgtatataggtgatatttaagagtttatgtttagtttttgagatcattctttcactgatactcatgtttctgtggattgcatttggagatcaatgaatactaaccagtttcttgagtggttgcaaaggg

SEQ ID NO: 28695 - DNA, 626 bp, Arabidopsis thaliana columbia
aagcagaagaaagaaggtgagaggaaacagcggagagagacagagtcagagaggtgtagaagtagtagctggtgagcactaataaaagacctttcttcgctcaatcgccgccgtaaaataaaacaccatcacattctcatccaacgaatctaatctatccgaccaaaccaaagctcttaaaaaatctatttttattcttacttcaatctctgaaataaataaacataaaatattgtagctttcctttgttgttcgacttttctcttttgtctcccctaaatttagtttctccttttaagtcagattccttcctaatcccattctttcagtcttctctttcgcccttctgagttcaacaactggtaactagatcctgtttttgctttacttcattctctgttttgttattcctttaaaagatccatcgaaacttcttagctctttgtctattttctggttattttgactgtttgatctgatgtgggttttgcgtctttctttagttgtggtattgttaaagttcgttactttgttctcgtttagcttcttgtatttggtctaatttaagtcttttgacttttgacagtgttactctatgaacagtcgtttgatgaagacacaaagtg

SEQ ID NO: 28696 - DNA, 513 bp, Arabidopsis thaliana columbia
cgaaaagagtactgaagtttccgtaaaagccagagccatcactgcaaacaaacgacgtctctctgttttgcattatcagtgaaattacagtaacgtcacagaacaaaacaggaagagacaaaacagttaaccaaaggttaaccggaattgaaccaagcatatttaaacaaaaccacaccacataattaagaaccaaacttctcctaattagccataaacaagattatgcatctcatcccataatccatcaggactaaaagcccaagttaaattgtcgacccaaattaaaagcccatatataaaaaaaggaaatttcttcgtgaacacgctttatatatctctgtcactacgtaaccctaactaaagctattcacaattctctcttctctctcaattttctctcagtttgctctcattacgattttcgacttcttctttgtgtgaatctcctctgattttgttttctttgggattttctctgttcgtttcaaaacatgacttctcttgaaatgg

SEQ ID NO: 28697 - DNA, 566 bp, Arabidopsis thaliana columbia
atgaaaaattttctttattacccaaagaaacattattcataaattaaaacttttattacccaaagaaacatgattcgtaattcaaacattttattatataccgcaaatagtatttgtaccaatcaaactttatttttgtaccgattattgtgtactaaccgaactttgtcctgcaaacacgtttctcccacacgtaccgcagttgaaccgtaccacattacaaaaccatttttcctacacaagaaaatacgctgttagcatttggacccataattatcaaaccatttctaaactgctggttccgctcgtctcattcacagccatagtttgaatgaaagagatcgtgggattgtggattagatgaacatatctattgtaattttcttttttcattttttcatttttggctatgaatgggaaacctaaacgaactatgtggtacggttcaataatttttttagtaccatttaatagcatactttttacaatataactgttgtagaataaaataattataattgcaacagaagtggatcatgtttcacagaaatcagtgtgtggtagta

SEQ ID NO: 28698 - DNA, 173 bp, Arabidopsis thaliana columbia
gtcgtggcaatttctacggataagtttgtagaattggatgatccaatggacatgtcttcgaggtattcctctcttcattatctcttagccatttgttcctttctgaatcgtgccattaaagtagtggacactggtattgtttggtataaaactattgttaccgtttggtttga

SEQ ID NO: 28699 - DNA, 540 bp, Arabidopsis thaliana columbia
tatcatactaactacaataggatgatattatgtacgaaaatttaaaattacatatttatttttctattagctagtattgtgtataatttaaactgataaacagctataaaaactgcattaatattttaaatgacatttagttgttaaaaatgacattgtatttttatatacagcactatatttcttacaatttaagacagatacatacttacactatatcacaaatatcaaagaaaaaaaaaacgttttccaaattccaaaactttaaacgttaagaggattaaatatgtgtcttgtgtgacgtaaaagcattggtaaaaccattccttaaaacaaatacaaatgtctcaggtttatacatgtgcctattatgcttaactcttaattctcggactaaccaattaatcgagattcttacgcatatatattaaaactattatctatttttttaaaaccctaggccaactaaatggcttgttgttttcctaactaaatttggagacaaggcaaagacgatgtaaagtgtccaagtttatgttt

SEQ ID NO: 28700 - DNA, 225 bp, Arabidopsis thaliana columbia
gcaatactacttgattttgcatgctattattttctatcaaaacgaagaaaaagaaaaaggctaggccacttcgcaagtagccacttgcaatagatcaaatcaacatacaagtttttttttccccccaaaattcccccctggttcacccccctggaactcctccccaaggtatgcccttccaatggccattccccggtaatccccaggccctggttttaattatta

SEQ ID NO: 28701 - DNA, 536 bp, Arabidopsis thaliana columbia
ctaaaaatataaataaactctttacctcaaaagtttcaatttgctatatacatttttttaaaatcaaatttaacaataaaaaataaaattagattacatattattttagaattaaattaacataggcccacttcttatgttgggaaaagggaacaacaaatataacaatttagcaacaaagaagtagaaaaaagaggtgatgtcataataaacggtaaaataataggaacgatgagcgagcggatctagctttcgtcaaaatcatcatcactgagtacatctgccacgtcagcttgattgggatctatttggtcgcccgtacacaaaatctcggctcactcactcacactactcaagtcaacgtttctaagattctccggcggacggattatgtcaggtaaaactatcgccgatctcttcttcttcttctgattcgaatctctcgtccccattccctgatttttttgatttacatttgataggatcttcttcaccgagcttgtggctggcaccgaatccgagcaagagatggggag

SEQ ID NO: 28702 - DNA, 768 bp, Arabidopsis thaliana columbia
caaagtggtacctcgcatctacatggctctcaacatcccaaaggaacgacccgaaagtaactgcctccaagacgagcctcttcattccaccgaagctgatctttatctgttcgtccttcgatgaatcgactgtgccctccggtgttattacaatctcaggcttaccaaacaatgcctctgtgtgcttctcgatgattccaactgcttctcttgatcttatagtggcgtatctctgcagcgtctccgcatcaaatgacatcacatatgaccttaatcgggatggtttaatctcgctgccgaagcccttagcactaactccgcccgcaaatgcaccaacctctgggtgagacgatacagccgcctgatatgttgccgtcccctcggcttgctcaacgcttgttttactttcatccgacccacccggaagaatcttcatcgtcttctcaagctgaaacctttggtccaccctcttcaagaaatatccatacatcacagaagcagcgtaaacttggccaactctgagcttgcttatctgtgcaacagagttcagatcacccattctgcttccaagaatcaaggcaagatggttgtgaatcatctcgtacatctcgggcgagtgaagccgctcgagtttctccactttggtcggccaagtatcaacccgaccagacggatctgaagatgggcttactgaaggtacaagtgatacgttagcttccatgaacttttgaaccaccaatgcatacaaaatctcttccaatgttcttc

SEQ ID NO: 28703 - DNA, 512 bp, Arabidopsis thaliana columbia
acaaaagaccctcatgtgaccttgataccactgtagtgtgtaggagacaccatcgagtataaggtgcagtgtaagggaacctcgaaacctttcaccaaagctaggagcattctcaattcggagtgaaaatagaaaggtagaaaagttgtgaagtgtggttggtaaagttctaaaagtcgaagctgaatgattggggaccttgttgtggagcaagttccgcactcgtgcccattgattcacaagaatccggtcaagctagtgacataaaacaagcgcttagtgggaggcaacccaccatgtattctctttacataccttcatctttgttctttcttgtttccttttgagtatgtctagcaacttcttttcgaattgttttcacatcgagacggtgtgaagcaagttgggggaggggggaggggggggggaggatgtcatttgtctactaatcgagtttgctttggttgtttgttttgttgcttttgttcgagttagtcgtttttttttatcgg

SEQ ID NO: 28704 - DNA, 614 bp, Arabidopsis thaliana columbia
tatcgattctgttgtgagagaaaacaagctattacgctccttggggttaactttctttgtgttttcagtattatggttttgtccacttcgtaatatcactttcctttagaacatttcaaatcagcagttgttttgaggtgtaatgtaatggtcactgatattttctattacccctgcatgaaagtagtatgttttatcaacaaagtggtaccaaaacattctctatccaagaaaactacaaactgagtgagtgtccatacttacaaagttttgagtcaatttatcattttctcatataccaatcaaaatctcacaattacaactactctttttttcttctttatacgatgatctttttttgacacaatatgatgatcatgaaagacaattgattatttattcacatgtatcaaatattctaaatactttgattttatattgtgcaaaaaacaaatatcaaaattaaaattttagtaaaattgtataaattgagaggtagaaaaaaaaagttatttgatcaacatggcatgctatgggtgaaggcccaattcatttgaaaactatgatcaacctttttgttaaactcactaattatttgaagcaccaaaaataaa

SEQ ID NO: 28705 - DNA, 736 bp, Arabidopsis thaliana columbia
ggattggctcgctatcaacccaaggctgcccgacggggtagtacaaattataccgtaaggtaagggagttggtcccttgtagacggtaagaggaaaggaatgtgatccttccagcctttgtggctaaggatcggagacattgccttgtgggaaatcaggatcgctgttgagacaaaggcctttagagtagtctgagtagttccgctgcataagctcggatagtatagttatgcatgcatgcttttgattgtgttcattacacttttccaagtgtaattggttgatttcctgtcgagtatactcaatcgagtatacttgaatgttgcattgattatttgatgcatgattgtttgttgattgcatgcatttgattgttattctaaggttttgtgtgggggaatattgcatgtttaggggagcctggactcactgagcgctcatccctcactctatttcgcaggtaaccatagtgagacaccttagaggggagcacggacgtcaggcagccgatgtagagttcgttcgcttgtcccgctatatccccccctatatctcgcccgactcgatttgcgtattaggccttggagagtcgaatacaaatgtatttcgaggtattttcagattaataaaatgagttttgttaaaaagccttgtgatttctgatattagtcttgcatgtagtaacacaactcgcgaatgcagaacaggttgaaaagccttaggcaatgtttgagag

SEQ ID NO: 28706 - DNA, 464 bp, Arabidopsis thaliana columbia
tttattggtcatttttaaaaatattcttttttttttataacaaaatgatcaaggaaaatatgtaaaaaatttgtaattcgtgaaaaaattcctttacaaattacaaaagttttaaaatattacaaatttttcagtttgtaatgatatgttcctgtcaaataatttgtcattttgttaaataaatatattatttgcatttttaattgtttaatatcatttttatagttaactacctggcaccgtagtaaactagcaacatttgtcagtcacattcaaaaagagttcaacaagtataatttctttgatgaagaaaataaaacaactataattcatccgtgaccgtcacgagtgtgagaagcttgctgctgggctgaatctgcctggttatttgtatccttattgaattcatgatcaagaacatatatatatatatatatatatatatatatatatatatatatata

SEQ ID NO: 28707 - DNA, 1195 bp, Arabidopsis thaliana columbia
caatatttatgtttttaattctcaatttctctttattgttatacatcttccacgatccttatcgaaaataaataaaatatctgtctcttttttttttctctctctctctctctctctctctctctctatgatttgtagcgcctctctctctccacgtctccataacttttggagaagtttcttaaacaattcgatctcgattatctcaggaatttggtaaaagttctatgtccataaggtcttggaggtggaggtctctgcaaactgtaacaaaatcaacaaacaatgttttggtgtccataataacgagtccatttaaatatatcccttcggaaacctttttactgctctatatccattctgtataccatgtccatgataacaagaaattcgattaaccggaatctcgatgctacatagatgaaacgagtttgacacatgagagagagagcaaaaatcaaatcaagccgccattgttgaagaagaagaagtttcttaaagaactgaatctcaaatttatgtcaaaacaaagatttaaattgcaaaataaatcacaatctacaatcagtgaaaacgaataaaatatcgaactctccaatcaatccataatctcacaacaatccgagtaattctacaatatagaaatctcaaattctgcaaaatttgaataccaaatcctttaactgaaagaagaactccatagcatctaaaatactaaaataaagaaatgagtgagtggattcaacaaataattataaggagatcggctattttgaacatccaacaaataactttttttgagaactgtctattttgaacaattccattgaagtagacgcaactaaagttgtttacaaagatgaagagagagagaaagaaagagagagagagagaacgtggattaaggattaagagagtagtttagttaatagggtattttagtaaaaaaacatagagaaagtgtctactcttttggaagtgcctaaacacggaataagttttaaaaaagtgtctaagagtgtaatattctcaaattttattctatcaaaacccattgtacaatgactgcaacggttagtttagtgttttagagagaaacctgaaattacaaagctgaaaggaaaattcagagagagtgtgtggatgaaagaggcctcgtggagaaccatagctgcaggcaagcgttgtagttatg

SEQ ID NO: 28708 - DNA, 877 bp, Arabidopsis thaliana columbia
cttcctctcattgcacgtcagcgattaatgacctgacatgaacccgtcggtccattacagtccaacatcctcaatgttatcctgtctttaatatcattattctctgttatttatctttatatatttatttaaaaatacgtcttaaagacgtcaaacaaatcaacatgtatatcacgctaacacctaacgcataacatcacacaacacatcttataatgttttaacaattaattcctaataattaacaatcaacacccaatgtctaatcctatacaaatgaacttcaaaagtacaaaagtagaaaggtgatactatgtttccacagatcccgccctcaccttagcaactcggttggataacacggtttcgaaataacagcaacaagaaaaggtccaataacgatctcaatctgcgacggtttaaataatcgatcaaagattatttttcattaataatctataattaatttcataatcaacccaaactatatatccttcaataaattaactagacttaatttaataaaataatccaactaaatctagtaattaaatattgattcattcactacatgtaacactacgtccacaattggatccatgcattcacgtgaatgatagcttccggtttggcaattaaccggtactctaacaactaaaccaatgaatgaagtcaacttcttcttcctacgacacaatttcacgtaacttctaactaaacaaacgattcattggttttaactggtttaatttagatcatggtttaataatcaaataacataatcacataacaacacgagaagattcccgattacctttctcggtgacttttctcgacgagtccccttacggtttgcttggcggttggacagcggagt

SEQ ID NO: 28709 - DNA, 517 bp, Arabidopsis thaliana columbia
ggtagagcccttgctcatcggcgctgggatctctctctctttaatcgatcttctctcacccttcttcccttatggttctatctcttgctttggttttcttttcactcctttcagaaactctacctaatatccaaactcttctccagcgataaatctgaactcttatctccattgaccgtcagatcccttagctctcaccctttcgcgattctcgcaggtcaagtcactcaccgttcctcctcacaagctgcttctccatcatcctcgtcatggaattcagatcccttcatcaagtgttctactcggttgtggcgggaccagaggctcgagttgtcacttgaaccgctgaatcttagttcggcggaagaatcaaccaaagtagacgttttatcttgttcagcagcagctacaactcggttagcttttgtcactattctgttggtttggcttcttagcatcatctccgatctgccgccgttgccattgaacaacacaaagaaggagctaaacctaatgt

SEQ ID NO: 28710 - DNA, 1034 bp, Arabidopsis thaliana columbia
aattgcttagccgttatcctaaagagattatccaagaaaacatggctaatgcaacttctaagtaagccttttgtatagttgtatccaccaataatcaatattccccaaatcctaggagccttttagacgctaaattctaaccgaaacaagttccttaagatatatataacataaacatatcctttataagatcttttgactgcagatataagctacctctctgtatcacatgtttctaatagaattaaacagaaaacatgtagagaccataaatagaaagttaaatatttcaacaccaacttaaaccctgagaaaccaatcaacgatcatcggacacaaaaccaaagttctacagagagactaaattttgaaaaataccaaaaaggttcgcaaaattcaagtttctagatgcttaaactaaaagctgattgcttcttaagatcaaatagggtcttcaattagctcaaaaacaacaaaaacctgaaatttaacaaacagaagctgaaaattgaaggatttaagcttgtgctaaacttgcgaaaaaaacaaactttatcacaaaaatcaacgaattttgacggagatagaagcagacttacaaaacttcgaaacccaaaacgtgggaaaagagaaatttcacgactcgggcgaaaaaaacgtgatgagaaaacaaaaaccctaaaacccggaaaacctcttttgcaatcaatcagaaaaaaaagaaggaataaactttaggataagaagagagacggatcattaacctcaaagcaacgtacgagttctgatttctcactcgattgagagagttttcgtgaaagagagtaagttattacgatgaagcaacaaagcaatggcaaacaataaaacacataacttttaaagagaagctattttttttatgtttttacaggaaaaaatccgccgggttcgggtctgtttgacccacccggttcagggcccaggagtgcgttgcaattatttaccaacttttatttattgggaagtgtgaaaattgctttttttgtttggac

SEQ ID NO: 28711 - DNA, 559 bp, Arabidopsis thaliana columbia
tgtttagctagatcaagtaaagtaatttattgcaagagtataagctttcctctcaataattgcattgaaaaacatttggattcaatgcagctacatatattaaataaaattgttcaatggagacacaaatgcatttgtgcaattccatgtgatgcagtaaaaaaaaaatcacactcccaaaatatctctctctacaacacaagtcaacaacacaatattcacagtcacaagctatatgccttttcttatttatagcttcatctagattctgttcaattttttttccatttattattgcattcttgattacttctgtctaaaagattcacaatcaattagaacttgtttagtaggtggaacttaaaaaccattattagttaacttatcaagaacggaatcaaactagtgcatccattcaaatgacaaatgtaacaatttgtcaaaacatgtgattcaatattttacactaaaatgcattgaaataacaaagtggaacaaaaggaaaaagaagaaaaacccgtgatatgattcatgcaatcataagttgaacataaacagt

SEQ ID NO: 28712 - DNA, 548 bp, Arabidopsis thaliana columbia
gtatatttattgctacattagagtcatttggaaacacttgaccagataaaacttgctagaatcctctgcactttggtggtgacgttgtaacttgatccatttaaatagatttatatggttccgcattgttttagtatctcgacaagatatggatagtactgatatttctgtaatgatgtattgatggtctttttactctggtttatatcagaggcaagcggaaagagtaaagcgagataaagcaggtaaagcgacaaaaagaatggatgatgaagctccgacagttcaacccgatcttgttccggttgcacgatttagtggttctcgacttgcttcggctcctacaccttcaccatttcagtccaatgatggaaggtctgctccacatcaaaaagttcgacgtttatctccaggatccagtgttggtgctgctattgttgatgttgagaacagtctcgagtctgatgtatgtattcctgtccctggaaaggcattatgtgattttaactcctttgtcactgtgtaattgagagtgggtgacttacaga

SEQ ID NO: 28713 - DNA, 521 bp, Arabidopsis thaliana columbia
tcggaaagcccacacacagtcataaacacagtgaagtatcaaagaagaccagagttaacccgaaaagagagagagaaaaataccttctccaatcttgttcaatacatgcttcgacaattacctgagtaggaggaggaagttctttgatcagttcaggtaagtcaccaccttctaaataagtagccaaagacactgagttgaatagcggcttcatcaaataaagttctgccaggacacagccgatagaattcatatccccagcaatgtccttggaaatgtttcctgtgcagaaatcttgccgccattgtaacaactcctgaagttcagtcgatgcttcatctctcacctccatatgctctaaaagataattcaaacttatccttgatgataaacctttgtattttgaagttccagggagactagtatttactttcttagtgttttcactgtaagatacatgcaaaggagactcaaccaggttttcacgaaggtgatactttggacatagatgtgttgcatga

SEQ ID NO: 28714 - DNA, 439 bp, Arabidopsis thaliana columbia
aatcggtatggtttttcctagcaagtatatataggttttaaccttcaaaactatatagtccgtagaatataactgtagtcgcctcaatgattttagaatggcgttgttatatattaaaaacccttatatgtattattagttttgatcgtatgtataacttatacaaaatattattttatcaacaattaagcatgaaattaagtaactattagccggattgatgttggggaggtatagtaatagttttatttaggaaaattttctttcaagaatcatcaattagttagctatatatatatatatatatataaatataggattctagaagatacactgactaacgcatttagctatgttaatacacagattccctacatttcttatggttgattggttcaagtttgattactttctgtcctttaacttatcatttagattt

SEQ ID NO: 28715 - DNA, 597 bp, Arabidopsis thaliana columbia
ctatttagaatttaaataataataacataattgtttgtatctttaaaattagtatagtattttatcccctgcatgtaaattttatttctaaatccgcaactgcatgtacgcctttaggttaacttactttgatatccaaacattagcatccatattgttctttcattaagattacgtttacggagtctattggttcagtgaactttctttaagaaatagtattagtatatataacaaactacttaaaatgatgaaacttgagaactgagaaacattaatctattgccttagaggccactagttaaatatactagtaatatgcatttgtgaaagagctaaaacttggtgtataaataagcatttcgatttcagcttcttcatcaatcaccatagcacatcgatcatgattttcatctatatatttctctttctctcctcagccattataggtaactaagcttccttatgcaccgttttcattcacaccattcatgtttcagatatttgctagagagtacataaagtacacttttcccctatattttaatctaaattatgtacataattgtgtatatgtggctcaaacgttagttggat

SEQ ID NO: 28716 - DNA, 552 bp, Arabidopsis thaliana columbia
tcaaaaacttaaaaaacaaaatcatttattcttcactgttaaccattttctgttgcaatatccttgtaaagcttttatttaaacacatggagatttaacatagtattagtttctgtaagaagttcttctgaaaataactaaacccaaaagaaaaaaaggttgtttataaactaatcaaagtaatcatcatcatcatcataataacctttacctcaaaaagattgaacctttatacttcatttcttaaccttcctttgctgcagttgctgcttcttaggtccaggaacctctaatctcccaaccgaacacccacatttagcccgaaaaacaagcacggctcgcccattaggtggagccatcttcttcaactccgcctctaactcacggtgatgatcacgaggcaactcaaacaaacccttcttactaacactcttgccactattagagctcttaacacaatcctcagtctctaactgaatatcaaactcagcattagctttcctaagccctttacagttcggtttccacatcgatgacgactacacagtagta

SEQ ID NO: 28717 - DNA, 608 bp, Arabidopsis thaliana columbia
ttcactattttaaagacaaacaaattcaaattaatatgcatatatagaatcgtacgcctttggtgtgttcctaatatacacacaacttattatttggaacaaaaaaaaaaataatcatttaactaaaatactatccggataatgtcatatatatgaattatcattcatctatgaatatatgtcaatttattcttacgtggttgaagtagaagcctcttctttttggagaaatgagtagaagctttttatgttatcataacatcatcgtcttacttttctccttttctttctttttcttcacatttttactttctttggtatcgaaaccttaaactttcaagctaattccgagaaatgaaattttatactaaaaacgtccatgattcaagattattacaagaaaaattgacatgaattatcgttttgctctggtaacaaaatcactacgtacttaaagcaaatttgaaatatcatttctgtcttctgatgacaataagttaacggtttggtagaactttttgtagggaaacttgtgaagatagagttagcttttagatgcaggtaacgtataaacttatttgaacggttagattgagaaaacgacaaaa

SEQ ID NO: 28718 - DNA, 500 bp, Arabidopsis thaliana columbia
ttaaaaacttttattttcgctcttctccagaaacattccgtttcagatatttttgatttttgaatttgttttcgctctctctctctctctctctgcttagattagatctgttcctgtgaattgattctctgtttcatcgtttgctcacgcccccgttttcgccggagaggaagctctcatcgtcgtttcgaaaatgccggcgaatgatgctgaatacgatctcaaagtaagattactgttttccgatttgttctcctcatcgaatttcaatttcaagctccattgactgattctatggtttcttcttcacaggttttatctcaatctgcgtcggcagggttagtttctccttaatccccctagggtttactttaaaatctccaatgagtactgattggaattttttgttttttgattgagaagggattacacatttgcgaatgaggataacttggagcattgtacgaagtatttgaatcagacgatggttacatttggat

SEQ ID NO: 28719 - DNA, 622 bp, Arabidopsis thaliana columbia
  unsure (1)..(622): unsure at all n locations
tgttcaactatacttgggatcaaagcaccttcaaagaaacaatttttaagcatcacagaatctaccaacaccgaagtagctacaagaatttttcacaatctgcagcatcacagcgaataaaaagaaaccccatcacgaccacaattagaacagagcaaactcaggaaaggtaccacatttaacgtttattccagctaaagatcctctaatttccaagtctcttaaccccacacgaactcgaagccacaaatcgcacagaacgtaatccaaaagagacaaattgtgcccaaaattaacaaatttctgtctacgaaaaaccccaaaaaccctaaagtgaaaaccttctagctttcaactactaaacaaacaaaagaagttactttaaggaacttgataccactcaaaaacaacaacaatcctgtaaaaacaaaatctttaacaatgaacaattagcacacatacacaagcgggaaaacaaaaacaaaaaaaacggacaaacaaacctgtcaacaatctccgacgctgacggcatgtcagcaatcactcgaacaaagtagcagctgaagaagaagaagacccaaacgattcagtgtaatagtagattagtagtagcanagaagat

SEQ ID NO: 28720 - DNA, 520 bp, Arabidopsis thaliana columbia
gttatcttgttttttaaacatctattttattagattaaaagtaaggagtataatgacaatgctaaatttagttgtctttattgtaatttctattcagatgatgtttattcttcttagctaactgaacaattgtattacgattttattaattcctaactaatatccccttccaatttcatctcgggtttagttaacaatttaatgtttagttatcggtttatggttcaatttacggttcagctcaaataatatggtaaccatggttagggatttaaaccagagtcctttacgagatcagagttaaaaaacaaactgcgtcactaggaagctgcgactatttgactgactctgatttcacgcgactccttgtgagattctccgattgcttcgcctgagtctctgggttaactctccatgccgtcactttgatctttgcttttccggtgaggtttcttcatccacctgttgagttccgaattcgcacatcttccgaatccacttggggccaaagaattgcaaa

SEQ ID NO: 28721 - DNA, 534 bp, Arabidopsis thaliana columbia
taaagagttttaaatagtcttagaaatttagaataattgtacgaacatatgacaatcataaatatttaacaaaatgagattaaatattataatctctaatttttattttcttttgctccatccctttataaatcaagattaatgttaattaccaatgcaatggaatatacaagttgattgttagaatattataatttatccaacaataatgatttctccaatttaatggaaatttacaaccaatttgaataacatttacttccatactacgtccttgaacgaatattcgaacccgggacgactcggtagaatgactcacccacctttcacggccatctccgagccaccaccaataaaactcgccgcctcaccaataaagaaatagagaaaaaaagaatcggagtcaaactcagccgcaaaattgtctccaataacattttcggctcgtaaactcgttccgagtcaaaccgagtcagaatcggctctctcattttattgtctatttactctatacgtacgaacgccgtcaagtga

SEQ ID NO: 28722 - DNA, 549 bp, Arabidopsis thaliana columbia
gttcagacgaaaaggcgtaaagacgtgatctttcttaccattctcaattggttttcctcctattgaggatctacgtgatctttcttgccctggtggcattacacctgtgagtgactgccgtcgcatagtcttagcgttgcttgtgtccggggactttatatgactaaaattattagcaactccaagtggtgaccgtggatctgcaggaatgttctctttcctgtgataacaaaaacgttttcaataaactggtaaacgcatcatttaacatgcagattgaaacaatataaagtctttgtcatacctcttctctgaaccattgatcagctttccaattgtcctcagggacttccgtatatgtgaaccttttccatttgtcttagaatcaacagaaatcatctgtatgtcgtttctggaagctcctttaactggtgtttgtaatagctggagttgaggaatgcttgttctgccatctactttcacggctcggttttgataagagcttagaggactccgtggatttttgagctggtgcacttccatggtggg

SEQ ID NO: 28723 - DNA, 510 bp, Arabidopsis thaliana
cgtaaggtggtggtaagatttatatgcaggtttagcgaaagcgaataataaggtgggggaggtggtgagtgtaaacatatggtgttggtggggatttgtactcaatctttggagaatgagagtagcatggtggaggtgggggacaaacacatacatgtgggtgtggtggcgatttgtatatgaccttaggtgaaggagagtagtaaggaggaggtggagagttatagacgtacggtggtggtggggatttgtatgatggtttaggtgaaggggagtagtatggtggtggtggagagctgtaaacatatggtggtggtggagatttgtatacaaccttaggagaaggagagtaatatggtggtggtggagagctgtaaacatagggtggtggtgaggatttgtatgtaagcttaggagaaggcgagtaatatggtggtggtggagagctgtaaacatatggtggtggtggggatttgtatgatggtttaggtgaaggggagtagtatggtg

SEQ ID NO: 28724 - DNA, 580 bp, Arabidopsis thaliana columbia
tagtaacgtgcgccagtgtgctctaaaggagttttgatcgtccacacgataggtcaccttacgaatcctaccgtttgaaccgccgcggcaatcggaccgatctaccagaggttaccactagcttccagtacggaaatcctcatgatttggcgtatgaaaagaccataggtaacataaccattcgctcggcaccgaacttcgcaacccatggtcgttcacgtttgtctaattcagaggcggctactcactcgatcgcgacgcggaaagtccacaaatcacaggaagcacctgtctttgggtcaagactatcaagtggtaccagcacctcccagcggaccctaaaagaggagatttacgccatcttggacaatatgaatgttaactcccaaacagatcctggcccagcgtcaactcagattcgtgaaagtacagagtctccacctgctcgtgtgcttggagtgcccaactgcttaaagctgagtctccagaattgcgatcgtatttgacaagcaacgatacaagagccgagccaagagacacaattattagggctcttgatttgaggaaagaccacatagat

SEQ ID NO: 28725 - DNA, 649 bp, Arabidopsis thaliana
gataatattgcataagtatagagataaagagtagatgacagatgacagatgaaatcaaatgccgaatctgaataacttggaaaaatctcgaattataggttgcagaagcaaaagcggcacaaccagagtaaaacagaaaataaaactgaagcaaaaactcaatgtcgactagatgtctcaggacagaaccctaaaacaatctatttatacaaaacgaaagaaaatgatagtagacgggccaataacctaatcgccccgcccatagagtgataatgggccgagatgggcttcgtgatccgatggaggtccaagccgcttccaaacacttcgtcttctcctcttctcttccttgtgctcagcttgtctggttgagtgcggatttgagtagactccgaagatgtgatcgagtgcttggtcaagtgatggtattggtggtgagtgatgatactcgaccaggggtcgagtaacgtggtagagtgaacagtcgagtgtggtcaggtggtatggcgaagtgatactcgaccacagggtcgagtggcgtcatcgagtggcctgagctgaggttaccgaccacgcggtcgagtagatgggaagaatggctcaaagatactcaccagggggtcgagtatggtgctagatgtcacggcct

SEQ ID NO: 28726 - DNA, 477 bp, Arabidopsis thaliana columbia
gttatctcgaatattacttgatctattctacccaaatgatcaaacccaactaagaatacctaagcctaattctcttctctgtttcttatcactctcacgtgaagacaaagaaaactacacactcaccttcaagcttttgcaatgctctgaagtttacaatcgtatgacagtattctagagtgctcaaagcgcctcacgctaagttctagaatacttatacctactctccagaaccttaaacctaggatcttcgagaatctcgttttaaggaattttccttgttttcaagtttattcttttctaaatcttccaaacgatattttccatatcttctcgttgaatcgtgtctttgataccatgccaagtcagcttccatccttggctctccacatcatccgcctcagcttgccgcatcagcttgccacgtctgctcttgcatccatgtcagcaactcaagcgtctgatgagactcgatgc

SEQ ID NO: 28727 - DNA, 253 bp, Arabidopsis thaliana columbia
agcagtaaagccaaatattgaggaaccacttctaagtctttactcatgagtcacattagctcggagacatctcttctactcctcaatttctttataatctcggtagatctctcaacttccgaaattcctccgttactggataattcacaacaagtagctttaatcccggggtcacttaagacatgtctcattttattcaggtacactaaattcctcaatgtcatctacgatgttaggttcaatgcgtccggtc

SEQ ID NO: 28728 - DNA, 445 bp, Arabidopsis thaliana columbia
ttttagataatgaacccaaatgtattttattttttttgcattttgtcatcattggcccagtggcatatacctcccactagggagagagagactaggtttgaacctggattcatgagatgacaacagaggtggtgatgttttatggagtatcaagggttccaaggataattctatatggtaaactgtaaaacgtgtcccgggttcgatcgacccctcacttgggcatttattagtaaacgaaactcttcatagtttgtgtagccgttgtagtagatagggtgatgaatccatcaataaaatgtaatgcaggacatggaagggacacctaatgctgcaggaccacagtggcctagtcctcgtctgtgccaaaatatctgtccccaaaccgcgccataccgaggaatatcacgaaactcttcgtctaatccattatcgatttcagatg

SEQ ID NO: 28729 - DNA, 546 bp, Arabidopsis thaliana columbia
cattatgaccccgtctccaaagagtggtggttaccaaagcttcctcaatcttttagccccaaacccaccaaactatagaaccgtagtcaaacttctccttgccgatgtgagaattcacctagctcttcttgggccggcaagttactcggctatggaacccttttctaggtcattatgtctatcgaccatgaccattatctcgtctacgattcggccgtggatgattctttgaaaaattgtggtatcccttgcgccaatttgcttcatagctttggtctccaagctttcatggatcctttgtcaaactattttagctatcctcgtgtagcatctacctttatttttttatgttgtttgtgcttttatttgtatcaagcctttttatcattgtatctttggctactttaaactttgttttgttatgatgaatgaaaacaagcacttgataaaaaaaaaatgtcaaatatataatcaaatatttaaagtattttagtgggagaatgaatgttttgtaattactggggtaggagtacatttgggtcagat

SEQ ID NO: 28730 - DNA, 613 bp, Arabidopsis thaliana columbia
tgcggattttcttccaaagtcatcaccattttcaatcatatcacgaagagcatcagggagtactttccagaactcacctacaaactccgaaccctttcgcctgctattctgcaagatatcattcgcgaggtacaagtatgccaaacgttgctcacgtggggcacagtgaaactgcctaccccatgtttctacaacatgttttgctttgttcatgtgaaagatacaccaatgtgataaagctgtataacgtcaaggaaaacatacaccataatagtatacaaggcgagagaaaaacaacacatcacatgagactaatcaaagggaaactaatttacaataaaagcaagttgggagagttgagaaaattatccgtgtatatcagacaccaatatcactgaaactcaaaattggtataaactacagctcaagtaaaagaaaatcctgagaatttagatatattctgcttgagaagagatccaatactttcatcttataccattgttactcattaacttagataccaattctgtatagtctttccaagcacctatttaagtacttaacaatgaaattacagaggtttcgtacgaccaaattatgatatacagaagag

SEQ ID NO: 28731 - DNA, 530 bp, Arabidopsis thaliana columbia
cagttttgttaatttgagattgttgtttccttaagatcctacttatgtcttgccatttcagaccacccccattgttccttcaaatcactgagctatgaacacacaattctctgaaaaaatcgaatttacagaggaaaacttcttccatggaatctgatatatcaagttaaaggaccaaactttagaatactttgctcatacgaacaatttctacatccacaacaacaacaatgcaatgtctttactgtccaaattattcaaacgatcaaagttaaacaaactcaatatctattttgattttggaaagcttttggagctcaattatccattgaaacaaacaacacaatggaagtaacaccaaaacacaaaacaatctgtgaaattcattcatggtttatactttactactcaaagcaaagacgtttaccagaagcaaattgattccactctttcatcagaaaccctaaaatcactccaaatcctgaacgatcttgatacccatagaattagcagtccaatgatggatttgc

SEQ ID NO: 28732 - DNA, 563 bp, Arabidopsis thaliana columbia
gtccaaaatgtctctgaaatgtatcaaccaaaactgatataggaagctacaaggctaagataaaatttgaaagcaaatatgtttctaccctaatgtttgaaatctctgcttcaaattaaagtagtactccaaccagagcagctaatacctcatcagaatcactttcttctaccctggtccgttctgagtccaaccttgatttcatccgtggtggtaagagtcttaagactgtagcgagtgtagactttagtttattgataacatccctactttgtcaccatagtgaccaggcttctcgtatttgagttctatggctcttacttgccaaaagagcttccttcgtcaaagaggtgttttggggtcgccaaagttaataaccagaggccggggatagagaagattcttttgggggggtttggggtcgtgactcatgtcgtaagttgttgcttgctacatcttttggattaagcttcacctaagctaaatagctagttgatacgttgtctacttttttgttgtttttgtcgttgatacgttgtctacttgtattgagcacattgatg

SEQ ID NO: 28733 - DNA, 489 bp, Arabidopsis thaliana columbia
ccatacctctttgagtagcttctagtttctatcacaaaaggagaaacttttggggtatttattgatacaaacattaatttagaccattttagtgtaaggcataggaagatcacaacgtctactctcatgaaggaaactcagggaaaaataaatacacaacacacacacacacccaatgcaaataacagtagtgggtcaaaactcggaccacctttgttctgtaaaacctttctgtgtcttctgtgacttatgtcggatgtgttacttgatgaaccttttaaaaaaaaagttaattcatccctcaataatttctgtgggtctcttccaaaatcttgttatttcaaagtgacctatctaatttcatgatcacctgtggattctcatcaaaagttttggaccaaactaaataaatgctccctctctctttcttcttacagcttgtacaccattaaatagccagggacctctcatcaaaccttggtcttttag

SEQ ID NO: 28734 - DNA, 974 bp, Arabidopsis thaliana
tcaaacaagtggtctcagttccaactaccaaaaggagcaaactttataacaagcttgtacaaccaaatacagaaaagaaagatcacaactttctaatctctaggcttggaccataatgcaattacaaagactttaatttttttatttttatgtaatgataatgtatggtctttgaattggattaatcttttggaaaacaatcacttccatttcttgaagaatttccctttatgcttcccaaacatgccgtgtttaccgaattttccgtgcttgaacttaccgtgtttgaacttcccgtgaccgtgatacccgtagccatagccatgaccatggtggtgaccatagtgtccatggtggtgagacatatggtgagcaccagctgctgcagccactccacccgctataatcgctcctatgcctccatggtgatgtcctgtcacattaatttggtttcaacatcaacattaagtctaaaggtctctattgtctattgttacaaaagccatttgacgaatgaattttgtttgaagatgctaaaggttataggatcatttggcaaaaacaaatacacactaaacataaaaacatacatcaacaaaaatctaaagcctaaatgtggtgacatgtaaagatatttgtaagagaaagaatgaaaaatgttgagattgaaattacctgagtgagatggacggggataaccgtgagatggataaccgtgagcaggataaccggctggaggataaccagcgggaggataaccagcaggagggtaccaccatgtggaggataagcaactggtggatagccatgaggaggaggaggaggcgggtatggataagaagatccataaccgtgaccatgatgaccgtaaccatgaccgtgagctgggtattggccgcctgcaaaccctgctaagttgtggaagaatcctctgtcactgtggttatgttgatcattcccatttctcacacttc

SEQ ID NO: 28735 - DNA, 632 bp, Arabidopsis thaliana columbia
tcgtcccctgaattacaccacgactctaagtgaaatcatcttttaaaccaccaaaattcacccaatgacacgaaaacatttctagcacaaagaaaatcaaatcctatcctgagatccaatccaattccaagctattagtccctcatgatccgagtgtagaacatgtcctaatagcatctacgccaaaagcgcaacttcagaagggttttgactcctctgctttcactatttcggtcctaagcctaaaacggatatactaatccgactgatactcaaccggatcaaccgggctgagacaaaaatttcttgaagccggggctttattggagagctttccttcttcttcaaccatccaaatggttttcttttctcccccatttctcattatttttccatcaggagtcgttgacggcagcatagctagaaggccttgaatcatgtaaatctgcccaggatcggtaagatcttcacagccaagctcgaaaatcacgatccgactcctctgtaccttcttaacactgaaccaccaccatcaaggaggctcatcggaggagaggtactccgtgaaggggctgaagaaggatacatcagatctgctgcagtcgtcgagagccaatgtgcccattgtagat

SEQ ID NO: 28736 - DNA, 460 bp, Arabidopsis thaliana columbia
tgcgatagggtggcgaatagtttcgacgcattaaatgtgtacacagaggctgcatgggctttaggccatttactgctctcatgcctctcttgcactttaacctcctcttccttcttcgtactctcctactaaaaaaaactagtaattcaacgcctaacattttagttttatctgatttctttttcgttttttttagttttttcttttttcctgctacatcactaaaagttaattatttcaaaaaagaattgctacaatactattcacattttaagtttgtttcatcctcgtaagtctcaaatatttatttgtagtttatttctttttgttgtcaaacttttagtttatttcaattagtgttttttctgccaatatgatcaaatctgagattcaaaatggaattcttctgttgaaaaaatggatgcttttgtaataaattcaagatcgtagtttttttttg

SEQ ID NO: 28737 - DNA, 567 bp, Arabidopsis thaliana columbia
ctggttttgttgattgaattatttgtttattcataaaatagtatttttgacttgcggtttaattgttgctttattggttgatttaattagatatttatgggaatatttaactatgtttaaaaaaatgggtcgggttgtttcacattcaacctccaaaggagaaaaagatacaaagtttttgagcacaggtttacaacattgataagaaagataacataaacaaagggctttaaggatagatccgtagaaactcggccgatagcgcaccaatggattcgtttgacctgcgaccattctgtgcatcccaatggtcggcgaccccatccaaaacccagccgcttattgcccacccactccacctttcggccaagcacaacaactgtccagccatccattcacaccatccgtcaccacgaatttgattttattcgtggccatattgacaaaaacaagatcaattctatcttaggtatttttttttttgttatgttaaagttattggtggttttaagattttgtttcgaagaagatgcaaatggagattaatattattgaatttgaccatac

SEQ ID NO: 28738 - DNA, 376 bp, Arabidopsis thaliana columbia
cactatacctgccactgttgagcgtttgaatatggacatgttaggctacttatatggaaggagagtttatgatcaactcaaaagctacaaaataaacctgtgttcgttcagaccatgaagcagaacaacaagtcccctacaaacaagctcacagaaagatgtcagctttagaacataagaaaccagagaagaaataatagaggaagactataaacaagagattaaagatacaacactggaaaataggtgacacaaagctatatatagtcaagagatcttggaggtcaatgtatcacataaacactgaagacttggtcacgagcaaaccgactactgtatagtatagtacattgatcttcataatctctcccccagt

SEQ ID NO: 28739 - DNA, 771 bp, Arabidopsis thaliana columbia
tgatcacattccatccttaaaaacactatattcaatcacgaaatcaataatcaataatatccaaatcatatattacgattcttcactaatcactaaaaatttatatttataaatttaggatatcaaatttattcaaatatttagtataaaaaccaaataaaccgattgcccgcagtacatcgcgggttaaaacctagttatcataatttgcattgacttgtttttcaacaatttagattgaatcatatgaaataataatgaacaaactaattcaatggcttgtttaaaaacaaggaaccgaatatcttactataaaaaaataatcttacgggagtattctagacagcctatgcatagataagactaactaattcatcatacttatcaattaaaaaaaaaatatgataagtaaaatcatttttaaaaattacatataattaattaaagaagaatgtaaatacttaacttttatagaaccaattatttttgggaactttacttggatagttagaattaggtgtattcaccaaaatcatacataacatttttaggcctttttcgatatacccatcgtgcccctactaaacgttataggataaaacgtaattacaaggaatacaactgtcacgtcagaaatcgctgacgtggattaatgaactcagccgtaagacgatacaacggcagttacggctgagttacgatatgttgcggctgacttacgacaaaaatatatgagttatgaaaaaataacggaattatgagtaaccgagc

SEQ ID NO: 28740 - DNA, 847 bp, Arabidopsis thaliana columbia
tatgttcaaaaatctagttactctataagtatgattcaactcaaacacacacacacacacacacatatatatatatatatatatatagccattctatacttacaataagtttattttctaagccagaacggattttgtttgtcagaattcatacaatacaaacaagagtataatacaattttctatcatcagatcatagagatcatcagcaaaaaagttgttacaaattagagaaaccttacttatttatgactttatatgcttaaacatatatactacaaaacttttatcaacacaaacaatgaaagagaaaacaattcaactacttcaaacttcactaaatagtaaatactcaaattaaatcccactaaattaaaatcgtgctttatctctggtaactgtcctgcttcccaaaacaaaaaaaaaaaactatgttcatgcatttcccttctgaaattgtacagtatgtatagaaatagttgcaaatttcataattaatttatcatgagtatagatctggtagaaatagttgcaaatttcataattaatttatcatgagtatagatctggaactatatatacacacaaaaaaaaaaaacaatgtcacttaaaaacaccttgattcatcaatctggaagaacaagcagtataataaaagtagtttttagtatcaatttttgatctttagagataaataataaggattatattcatgaagttgttcatatcagcaaatcataagagacatcacaagggaaaatgagtagatagactaattaataaaagccctaatcaaaaaattgaagaacgcaccagagccctaattcaagaacactccaaaaaaaat

SEQ ID NO: 28741 - DNA, 589 bp, Arabidopsis thaliana columbia
tttattaacatgatgagcattcattagtgctatgtccaatgagactataatactactttcttaaagacattggattccatgtatcttcgttaatcccattattcatattcgtatcatgatataaactttttttttggtccacctgaaaacttttctatattgcagaatcactacacttttttttatgtacactttatgagtgtgtatgcataagttggtgattggtttcacacggatcatgacattagctaggtgaccttaagatcctatatagagagataagtttggttgattcccttatacagatattatttgagtaaactttaatcattttatgcttgaacttaaaatcgtttaatttgtttctttttcttgatgtttttctgtttatgggttcatactgagacataaaatcgtttatttaagtaaactttttcttgtcagacaaagtacgattctacttttaaaaggctgggttgttttcacaattttatttttacccaccatgcaaaattattgaacaaccgtacgttgttgcattattgtatgtatgtggtaaaatattgtacatacgttagttgacatatta

SEQ ID NO: 28742 - DNA, 256 bp, Arabidopsis thaliana columbia
cccgattctgggttttaggcatttcaaactctcccaaatcaccaatttaatctgcgaattgaagaaatttcgatgtgaaattttgtagtcttgttaacaaaatgttgtttgtggatctgaaatctgatgtttagacgacaaattgattccttgagtctcagtttctagtttttgcatctgaatcgttgttttgtaacgcagaaccatcacctctgcataccactacaattgtggagaagtgtacgctcaagcttgt

SEQ ID NO: 28743 - DNA, 613 bp, Arabidopsis thaliana columbia
  unsure (1)..(613): unsure at all n locations
gtcaagttgttgtgatcattgactcctttccattttttctatagatttgaattttaaatattcattttcataaaaaaatgaaaactttattattatatttgtgagataattagatatgttttaaaacattagtaaatttagtatagtattagtttttactaaattaagaagaaagtgacgcacgaaatggcgtaatttcctcccccggaccacatgcatcttataaatacacaaaaacgatgtcaacgagtgattttagtaatatgtacattaaagtaatattttctttttggtaccaataattaccttaattaatacaagtatagtttaagcaacaagcaacattctttaataattcgcgaaaaatattaataaaagtacaatgacagaaaaaataattaaaaattggattaaaaaaaataatattagagtgatgacataatcacatgaggatttagatttagcttaataatgtttagttgtggactaaatttccgaacaattattttgttgtatttaaatcattttatgaaagtctaatctttacaattactttatagtacatccgattaacaaagattnaaatatagtactaaatcaaattaatatattt

SEQ ID NO: 28744 - DNA, 585 bp, Arabidopsis thaliana columbia
taaatgtttattttactcataaaatatgtttatatattattaaattagttataaacccacacacttcctagtttatatatatttatcacttggaatggatcccaaagaaaaacacaaagcagcatcaccgccaccaagacgagaagaatatgacgacggaggcgaattctacggcggaggagggttatagtgtacagagagacttttggcgtcaagcggcgaaatccgatgtaatttctttcatcttcttataatagcttctagagaatttagaggaaattgatagcttgtatggttgttaatatggactgatagattattttttgctgatggatcgatcttagggtttcgatttagagaacatctcacttccaccaggtacgaatggaattgtcatgggactgattccctacgactgtcaacgtgcaaggcattatccgtttcctgtcttggtcaaactttatgctaagtttgggcttcatcgttacaatatgttgaaggtaaaatataaatattgattgattgattcggttgatttgcccctctagttgtatgctctgttatatatacgatatatattgattg

SEQ ID NO: 28745 - DNA, 537 bp, Arabidopsis thaliana columbia
ttatgtttgtcgtcaactttattttattaggttttgtcattaataacacaaagaccatacactctctctaattatgtctttatataaatatgatggtctagtgattttcgttactgaagtcgtatctattcgattccaaatccgtataatgcatgccaactacacaaatttcactcgtccatgtttgtgtgatatctatttatgtgtatattatacacagttacacacattcaattttataatttgtatcaagtatatacgtaaacgattgtcatgtacagacactcaacatactttaaaaaaaactatatatccatttacttttcgaaattttgaaaccaaatttataaggaaaacaaaattttaagggattgaatgttccaaatagtttgagatggtcctagaatatgaaaacagatttgaaaagacacttgataatatttccttaaacaaaaatatatatgatcgtcattaagacaaaagtattagattgagaaaaaaacctccgaataatatattttaaaaaccaaaatgaaa

SEQ ID NO: 28746 - DNA, 884 bp, Arabidopsis thaliana columbia
taatcaaataattttgttgactggattcgaagaacttactgaacaatttgttgtgggttatcgtcagattatattataaatacatgatctatgagatgatcaacatttatttaggatgatgacaattcaattaaactctcaaaattgtcatcataaagtttgtattggttagactagttttatctcgatgggtttaagactttgagtaactcactgatctcatatgaaaaacaaaactaatttatagaagctatattttttttgtaaattttagagtacataacaaaccgtatacatggaaattgatatttagctttaactaacataattatgataaatgagtttactatcccgaattagctacaataatataccggtaaaaaactacaatttaattctttgaattgatgtttttaatatatataaatcaaaggaataaactataatttaatttcttaatgataccaacatcttaaagatatcattaaacacaatgtgaacaaatccaaatgaaaattgacttacagacctcaagctcttggatcggattatgtcaccatggtcctatatagtatgaataaaatgaccaataattagcgatttcacagcaaaaaaatggcatttaatacataaatcactatatgaaaagtaatagtaacaacatatagcccatgcatttgcaaaaattccaaaacttaatattgaaagatcgagatcttgttgttgtaattaatctttttttctttttcccgtcgacacgtttcaacggacacgatggaagagagcgtaagtatagaatcgtccaagtgatcacatagcgacacgtgataattcaaatggggaccatgtacgagctatacgataaaatattggctttttggagt

SEQ ID NO: 28747 - DNA, 515 bp, Arabidopsis thaliana columbia
ccaagaaagcatcacctttcatcatgcttctactaacccaagaagaacctacagagatgcagcatctcttttcacttagtcaatcaagattattcgaagacatggatttgtgtcattaattcataattatatataattgattattgatatttatagattttatatcatccctgtaaaatcagcaaataataagaatgaaggagaaatcatcaatctaaagggatttggtgtgatttattcaacaacccacatagattaatatgtaggctctcttatcatgtattatcactttctctaatcattttaagttaaatgaagaaacaacccatgatagaattagtacctaaatgatcaaatcagtaaaggatcaatggaggacaattaatctggatgaggacaagtcccatgtgagattggaaaatcttccaagtcaggtctagaaccaatcaatcgctttgggacctcaaacttacagagttaacagttatgttggcaacaatgtttgaatagacaaa

SEQ ID NO: 28748 - DNA, 534 bp, Arabidopsis thaliana columbia
tgttaaaatgcatgggaaatctcactgatgcgaaagaaacaatctcgacagacatcctccaaacacacgaatcatcacgaggtgaaactatagataaacaagagacctagagtattactacaaacatatataagtagaaacgagaagagtcttgttagttaagagggattcaccttcaggatggtatattggattctggcccgggacaagtcatctctattgtggtaccattttatggagagctgattcgatattaagataaatggaatcaagattggcacttctagttctaaggattggataatcctccaagttcgagaagacaactgtctcatcttcttgacatatcaataaatgctggcgcagtaaagtccacaccagagtccattgtccatataagaatgtcattgaacattctcatagcgggatttttgcctcgggaaggaagtatattcttgccttccacgtcttgttacataaaacttaccccatgtggaaactttcttatcgttaacatgagcccaaattgacatc

SEQ ID NO: 28749 - DNA, 460 bp, Arabidopsis thaliana columbia
cacgtaatagttatctttcacaaattttatactcaattacaaaatcaacgaaaatgtacatttgtatctttaactatttacgttttttttacgtatcaactttcagttatatgttttggataatatatttttttacttttgacttttcagttttcacctaatgattgggatatacatatgcatgcatagttcccattatttaaatgtaagctaagtgcatatgaactgttagtcaaaattacgaagtttatttgtacatatatatagttataacaaaatggtacagtaaattaaacagaacatcaagaaagtacaaaagactgaacacaataatttacatgaaaacaaaacacttaaaaaatcatccgataaaatcgaaatgatatccaaatgacaaaaataacaatatagatgatacaacaaccatgacaatatatgaaagagtgttatggtggggacg

SEQ ID NO: 28750 - DNA, 528 bp, Arabidopsis thaliana columbia
tttctatcaccagccacagtagtccagatcaaagttccatggtcattcagatatcaagtaatattcacgattttcaacgtatatattttccctctaggatttgaacacaacattcatatcgcatacatttaattgacataccatgtacatgtaatggtatgtgtagtttttcagacaataaactgaacccagctatttaaaaaagagtcaaaagttgatattcgcggaaattttcgtaacggcactatgaagagtctcaaaaatcagagagggaaaaacaaacctgaagtgtaccacgaggaatatgaactgcttttggcttatccgtccgcgagtcaatgcttttttggagaaaacttaacgccctaacaaccttccaaacaagagaaccattcttggtcaaaagtcttaagcaaatttctagctaaacttcaaattaatataggggttgaaatacaaaatgatttgtaaagaacaaaaaaaatgagatccagaaccatgtctgactttcccagtgttcctactaga

SEQ ID NO: 28751 - DNA, 348 bp, Arabidopsis thaliana columbia
caagtgatgcagacattaacaacaactcagaatagtacgcctggaagaagagagcattaaataggcttgtctagcattgctatagacgccaatgtgatactcttgatatacatcacaacaagaagaagccttgtgatggccactacaggagccatctgcagattccatcgtaaacccacgatccgtgtctcagcatccatgtaattctgaactccagggctctagacaggtccgctttccacttgacaccgaaatcattagtcgactctcacccatctatcgcagataggcttagaggagaagaggatgctgcgggttctgtgagtcccacatgcggagtcccctgat

SEQ ID NO: 28752 - DNA, 551 bp, Arabidopsis thaliana columbia
tgcagattctatccacaaaaagcttctcgaagaagagcaaaaaccaaaccctacgagtttgcagagacagagagagagtctgtacttgaaactgtcgaaggagagagagatatgagaaaagaaatttcaatttcgaatacagagaagaagcgggtgtggaactgtggaagggcaaggctcaaaagctaaaaacactttattcctaaatcaccccatagactttgtatttgtatctgaaataacctttgtttaccataattattcgacacactttgggactttttgttatttgtttgttatacatcaaatgagtaaataactcttttatccaaatttataaccatcgtctatttgcaagcttattcattttggcacaaccttaggtgaatgaactgtatcataaccagtcatgggtccaagtaaatgaacatttaagtttgaaacctcaaatacattatacataactaaatacatccacactactttagaaaaacttaaatttgaattatgaaacaaacaaactactagagtaaacttaaatttgtttttgt

SEQ ID NO: 28753 - DNA, 237 bp, Arabidopsis thaliana columbia
ccaagaatcaatagagacaaccgcgtttgtaacaagagaagaagttctctcatgctacattcggatcgaaccaggaggaaaaaccggttaaacttccggatgatagaggcgaggcagttggtgtcatgagcaaatgtcttgagaattttcttaggcaagcctttgaggataattctcttgctggggctataggccttggcggaaccggaggataatcgctcatatcatctgctttta

SEQ ID NO: 28754 - DNA, 797 bp, Arabidopsis thaliana columbia
  unsure (1)..(797): unsure at all n locations
aataataataacgaacacagttcctaatacctaattttacaaaatccactacaggtactacaattcgaggagggagacaaaagctagcaactaaccaaaattacctgacggaatcgaagagagtaaatcggaagaaggcggaggagcgaactcattctccttatctgccgcactgatgataacgaatccgtcatcggtggaatcgtcgtaagagctcgaagtttccagtggtcgccgagtgaaaccagctcctctagctaccactcctccgccgttacgaaacaaccgcacaatctcattccgattacagatagtattattcctcgccgggaaattaaaataaggcggtggagctctcgccaacatctcctcaagtatcttctcttctctcttctctcttctcttcctaagcagagtgggataagaacataaacggtatagtcatcatagagataagagaggagtggngccgagactagaacaataaataaaatttaaaagattaaaacacatacaaataataaataaataaaattgcattccatctaataatatcctaatttctttttctattgggaaactaatttccttatctccttatatatagatatatatagatatatattttttaacaactcttatctcgttatatatatatatatatatatattagttccaaacccttaaaccctgcaactttctgtttcttctctaaattggtttttaagagattatttattggttatgatgtctcaaactaataatcatgatactagggttacgaagatttttgtggg

SEQ ID NO: 28755 - DNA, 808 bp, Arabidopsis thaliana columbia
aaaaagtagcattaaacatgtgagggcaaaactcacacagtcgaattgtatttagggttcttcaaagaacagatctttgtgcgctctcaaagaacaacagaattatttgattaccgtggacggtgttcttgatcttattattgaaaagatgatgattcgatcgtacaagtgtttagaaaagtaaaaaataggtgttttgtcttcaaagtcggagcgttttgatagtctgaagttgagagcgtctttatgcatgtcccctttgttcgttccttgaggcgctttatataggaccttggtaaaccgcctctcgcgatattctcggaagatttccagttatctccgagtcggcgataggggttcttttctatatggaaatcttccttattcttcgggagtttcgggaaacttccataaccgataatatcccagagatatttttgaaatgatatcttgacccttcactgaatttgtataagtatcctcctcgggtggatattctaccttgggctcggaccgaatgccgcgccttccaggccgagcccaagcgatccccgagatatagttgagcttggctcgggtgtgttttctggaataacacccgagccaagtatagtttatttgaggtgtcccctgggtcacaatgtttcatcgcacccggctgggtgtgtgtttcctggagtaacacccgaaccggaacagcgctgacctagctcctgaaatgctgatggtatccatccgacggctcgggtactggggtgaaatccgccccaacagtttgccccctgctcgttgtttttgacagaaggat

SEQ ID NO: 28756 - DNA, 676 bp, Arabidopsis thaliana columbia
tgactaaaaaaagacgacgaagttagaggttaaacctttctcgttgatttccaatttttctttagtatatatatatatatatatatatatatatatatatatatatatattctcctaagagtcgaggatggtttgattttgccttcttgcttggaaaattgatacggaagatgcttttaaccctttttagttttactcttttatcggcaacaaaatccactaaggcaaacttttgggatattgaagggttcgtttacaatggatatgatcagtttgttgctagatgatgtagtctttaagatattgtcattggttccaaccaaagatgtttttttttttttttcataaatttccattaaaaagaaggattacatggccaaaaagccttacatcaggcttgtaggcccccgaaaggcacgcaagcccaacaactaaaacaaaagcaaagaaactagaacatgcccaaaagcccagcagaaaccaaggagaagaaaaacaggccaaacagggaacggcccaagaaacaaccaaggaaggaaacctacaacacaaaaaaccacagaaaacgtcctaggattggaatagagagaaccaagtcctcagaacagaaggcgcagaaggatgaagttctgtaatgcgagagataggatcaatcgagcacgaatagtaagctgga

SEQ ID NO: 28757 - DNA, 616 bp, Arabidopsis thaliana columbia
tagtaacgtccgccagtgtgctctaaaggctctatcgagctttgattgccttaaagatttcaaacccggtgtataaactctggtacggcacacctcaggctccaacactaccagatgtaatcgtcgagcattttcttctcgtcttatcctacttcttgtatgcaatgaaactgctctgccaaactgccaaagggttaagagacacctagcccgcgatgaaagagtactattaatcttgctactagctctgcacgacgcggatattcacaattatgccttctcccttgcctcgatcgccttgtgcttacccttgtttttgtgaaagtactcctggaccttggctctcgcgatttgcactgccatggcatcctccacggtgcttgggacatcaacttcccgatccagatctccgtaaaccccatactctaccaactcccaagcacacgccgtaaaatcatgccggacctcgttttcggtatcatgcgtttgccctgtactataccttccaaggacgcaaatgcccaacccggctcctgacgagcgactgacctctcgcgcgacagtttctgctggtatggcagagtctggacgatacggcatggagagggagatgaat

SEQ ID NO: 28758 - DNA, 539 bp, Arabidopsis thaliana columbia
agtaacgtccgccagtgtgctctaaagggacccggcggacgtgggcaggcacccaacgcggagaaacgcgacatcgacaaggcggagatggcgataagataagattcagcggcagaattaataagatgaacaacctgaggccagcaaggccagcggctcttcaccaccttaactcatgcggtccacgactgttctccagcagcaccatccgcgcttcttctgacttggatcagttttcttgggcctgatctgtggaggatcagaaatatacatatatatatatacatatatatgtctgattcgtgtactgcggttcatagatgtgatgaggtaagcccaatctggggtgccgttccgttttaaggttaccatgcgaacattaacactcccttgagcagcttccagtgctgctgaaaataatataactttcgctcatccagactccagagacagatggcttttacctgaacggttgtctctgtgttatttgcgagttcggcgccgcttcattgattactgacgctcctttgccctttttt

SEQ ID NO: 28759 - DNA, 534 bp, Arabidopsis thaliana columbia
aaaagtcttgattctgaacaagaaagggttacctatcacctggaagagaccaaaatgctcactttgaaactaactgagagtagaagaacccagaaacacatgaatattaacattgcacatgctgaactattccctgattttacgggggcggtattcccttggaccagccccagagaaaggatcaagtcaaggttctcgtttttgccgtatgaccagcccatgttgctgtctgatatcgtgatcatacctgcggttacatgaactgaacctgatgattgtgctgcgtgtaaccggatagctgcatcctttgtagggaactcagaagcatttgcaagcggacgaggaatagcacccaacatgtggcatgcattctctagtaacgggtacttgtaatctgcattttcagaaattgatccatcatctaaacagagcacgcacgcctattaacacatgggggtaaagtctgatcgtggtacataattctctagctggctcagactctgttgcatctgcatcaacttgtgttgaacaaga

SEQ ID NO: 28760 - DNA, 325 bp, Arabidopsis thaliana columbia
tattaaacgcagaaatcaaaacgacagatagaagaaaaccctaggacccactttcttcctccaacaaattttgtctctttttatttatttttaacttttaattaaatcacccgcgccctgctgccaaaattaaaaaataagacatttattactcgtcccttctggatacattccataagaatggatagtaggtgattgcccactatgcccactacacaataaatatttggctttattatttctctctcttaaaaattatttaactctaccgcagcacattattctcttctctccggggatacatctaacaaaaacccaactattt

SEQ ID NO: 28761 - DNA, 515 bp, Arabidopsis thaliana columbia
agattagattagataagaacattctagtcaggaagattgtacgaaacaatgtttacctggaactgtaaagctgctatctttgtacgagcttccaccaggaacatcaacatcaaaccttcaaaaaccagaagttgttcacttagtgatttggaccatatacagaatctagagaaactcaacatttaaaatctgtgatagatatgaacaaatagttttccataatccaaggagagtctaattgtttacaaatgcattttctgataagtgtctcggatcattccagcatcatcgatcacaacatgtgtattacacaaatgagtatcatcaaatctctcttgaaaacctccaagagacaaccatatatttgaatccctgcaaacacacaacatattaaaaaggctaagcaatgcctaggaaacaactcagtgtacataagcaaaataatatcgtttacctggcgagagagcaataccgttccatcactgggccatctaatggttcagcaattttcacac

SEQ ID NO: 28762 - DNA, 566 bp, Arabidopsis thaliana columbia
  unsure (1)..(566): unsure at all n locations
tataagattgagacaagaacaggtctttgatcaaacacaaaaaatacaataagaggtgatacaagtaagagatataatttgtcacaatgatctatnacaatttttattacatatactatatataggtgtaaagacagagaattatctaagtctttctgtaacttctcaagaatagtccgtctctcctctacggcaagctgcacgcgaagccacgaagatcaaccaaggtattaccagttcaaataaaggctgtaataacaacaaattattacgtaatcatttaacacaaaatttatatttgtttgaacctacacactaaatacctctaaacaaaaattcacggctctcttntctttgtctatacatctaaaatcacaatccacacacaatacctcatatatacaaaaatctatacaatatagacacatcgtatctctccagtaanagagagcacaatctcttttcttcatctcattcatcggcgggtagccgtgctgaaaaggacggctggtggtggccagcngacggcgacggctacgctggaggggacagggttgaagccaggg

SEQ ID NO: 28763 - DNA, 613 bp, Arabidopsis thaliana columbia
cagcttaattgtttttagctagttgatgtaactttgttataataagttacacactaactaaagacttactattaataaccctttgtcgaatttttctttcttaattattatatttgggaaaaaaggaatttgtgtaggttagaattcaagttcaagttcaatgcatctttcatttaatttactttccgtaaaagacttttccttcttgtttttgaattgaaccaccgatcagcatacaacgtgtctatcctcttttttaatatatacatctagatttgatttttgtttgtttgtttgtttgtttcaaagtacaagttagataatattttattgactccatgtcttaagtcgtcaaacatatatacatatggcttcttacctaactgattagagtaattttgaccacgcatgttccttttgttcattttgaaaatttagttatcttagatatcattctctatcaactttatggttgtccttttatcaatattttgaagtatttctttccacatgattaactcgtttttaagcttcgttagttagaagccaaaatatgtcaaaatgacacatacgcatggtctttatcaaaactcatgacgaattagttttaatt

SEQ ID NO: 28764 - DNA, 596 bp, Arabidopsis thaliana columbia
agtaacgtccgccagtgtgctctaaagccgggagctgcggacagctggtctgagggaagagcgcaagaaggcgcgtgatgcggatcgagcagcggaaccatgatggatgtggacaagacaagggcagaatataataaaggaagaaagggacaagtagagggagatggaggaggagaagaggataagaggagagacgatcgggatgagcaggaaggacagggatacaaataacccaagcttataaggacaaccgaccccaggaacttagaatgctatcgaacacgacgctcagtgctcaccaatcaggggggtcacatctgagggatccggacccagaccttcgaattgagtcagcagcagatgtcttaagattggctccaaagaaagctctccgcattatttgtctttgccgatgttcagggccgctgcctgcagggggtgggcgacacacaaagagggccaacatgcgtggcaatatcaggccatagcgggtcgaccatggttgtctacattgtggcggcattactcatacagaggatcgaaacaatctcattagatgtgaatcagaatgttttcgatgatgattaatagaggtg

SEQ ID NO: 28765 - DNA, 560 bp, Arabidopsis thaliana columbia
taacaatacatttgattccataatgtatttgtttcacttaattccacagcaaatgatcgaacgtgttcactcgcggtaacaaagatgacaacaataaaaaccatagacatattaagtttccccattttgattttttttttttttttgctaagaatgtaaatatttcattaaaaatgaaaatatttaggaattacatgagtaaatcctataatttggttccatggcaaaaaagaataaaaaacatggaagcaaataacaatcgatccatcgatatcacaaaagcaattacactttcggaatcaatgaagcgataaaccgattctgaagtttttctagatgacacctcgaggaagaagttacaagttgtcaaacgaccatgaccgtttcatcaaaaccaaaaggattggaagcctttcaccggtagcccgagaaaactgagccgtcaacggtatagaacataaagcactcgatcaccaacgtcacccgcgtcgcgtgagagtgactctttgaactatccatgagctctctcagagcggaaccacacgaaccaaagaaaacga

SEQ ID NO: 28766 - DNA, 553 bp, Arabidopsis thaliana columbia
aaatcacaatagtagtggagcatatatagtagagcaaatttgttggatatgttaaaaggctattatatgtatttaggtagattgttagtaacttattttgaattcttttttagaaattgtggtagttttcttaattttccctactaattatgtgatttttaatatataaaaataaaaaagttttgttttgcagtttctggatttatttgtgatatcctataatgatataattatgcaatgtcaccaaaaccaaaaccaaactctaaaagtgaatcatcaatgtgaatgcaatagctgtcacactctgtgtctgtgggtcacaaaagggtactttggtaattatataactcggggccgttcggttcccaccgaacgaaaatataaaaccgatcaatctgagacggttgattactctcacttcagacttctcttcaacgaaactagccagagagatgacgagcaagattctagttatcggagctacaggtctcatcggaaaagtcctcgtagagaaagcgccaagtctggcacgcactttcgctctggttagaga

SEQ ID NO: 28767 - DNA, 519 bp, Arabidopsis thaliana columbia
ctatcttaatcaaaagatggtgatccctctaaagatattgtgtgctactgctctattaatcttattcgtcaatgttttttttcccggaaaatatttaggttcgccttttagggtgtgtaattataatatttaggttcgccttagggtgtgccgttgacggctcagttttctcggacttccgttgaaaggcttccatcgctaggttttttgttgattcggtctttgccgtttggtagctcgtttcttgttccttaaggtgtcttttaagttaatatttagaatcggtttatcacttcattgattccaaaagagtaatttcttttgttgatgtcgatggactgattgttctttgcttccatgttttttatcctttttttgccatgagaccaaaattgtaggatttacttaattgtatctcctaaacctttttcatttttcaatgaaatatttacattcttagcagacaaaaaaaaaaaaaatttgtaacaagatggaaactagctcattggcaacaaaaag

SEQ ID NO: 28768 - DNA, 518 bp, Arabidopsis thaliana columbia
  unsure (1)..(518): unsure at all n locations
gagaccgaattatgagtctaaaaatggcatattagaaccaaaaaagattagcacatgacatttcaaaatcttaaatggtaacattttcaagatttttattctatcattagttgtttctatcatgacatttcaaaatcttaaatggcatattagaaccaaaaaattatttgttttattttgtacgtacaattaccatatttttattcattgtcatagttgttcaggtggatcttagatatttcaaagtataaaatttgtgatcgtattttagatgattacacacatatcacatatgtaatgcacataatatttccaaattaaaggtaaaatattatttttaccggagtatgtatatattcaatccagattatttttaaaaaattagattttttttgaatgatcagtcttatcaagaattcaaaagatagtgttgttgtcaatcaaaattactanaagaaaattgtttagtcaacatatatacgtaccttaataaatattttccttagaatctaaaggaa

SEQ ID NO: 28769 - DNA, 482 bp, Arabidopsis thaliana columbia
cagattttaaaatccaagctgatgcgtttactcatttcatctttaattgtgagttattaattttgaaaaccagactttttttgtaggataaagaacttttacaactttttttctataacccttttaatatatggtttttattttactttatttgtctaaatttcttttctaatacagttacaaacttttatatttttatcttaaatatttcaaaacttttagattttatacatggtgaaatctgatgatttaattgatatttgttgcaatcacgagagttagcaagtttgagattattgttttgaaataagatatggaggataaatttattttaaaaaagagagagaaaaatgaaaaaataagaaaatacttaattattgttttgaaatactttaattaattaaaaacaactatatctttaactaaattttaataacatatcatataattaagtataggttaaagttcattttcttaaaaat

SEQ ID NO: 28770 - DNA, 534 bp, Arabidopsis thaliana columbia
gtatgaagcagtactcttgagtgttttcacctacatttgtttttcatttttttggtttaaaaacaagtaccaaagcgcccaccgtggggcacgaacacttacttttttgttttcttttaatttgacaactcgttgacaagataatcacatgtgtcgtcaactcgtaattcatacatgctttagagcccaagaactccttcaacattatgtttatttgtttatatttccaatagacattgagcatttggtttagtcttatatattcttgaaatgtttgaaagccacatagttagtttcaaatttataaacctcacacttgagtaagtttataagatagtttctaagtttgaagacttaagactgtttcaagacctttcagagcatgaatagctcgccatgtccaccgggcactgactagtacttttttgagcatgaccttaccacattatatcgcgtaatatgattattctttttgaagtaagaactcatttaacatgcggcctaatagttttaagttatttggactaacacaaa

SEQ ID NO: 28771 - DNA, 642 bp, Arabidopsis thaliana columbia
taagttcagttagattagtctaggtgacgatgtgggcgtgtctccatgggaacgagcattccactctctccatatgcagtgaatcgaagcttggaaacgtaccggggtaagaacaattgtgctgcttcaaaggtggtgtccgagagtagtgggagaaggttgttccaactaatggcacatcgattcttgagaagatgtttatatatcatcttaaatgttccttaaccacaagttaaatttgtgagataactatatcgatctgctaacaagttgattgacactcaacaagtctttgtaaccaatgtttttttattctttttggcatggatacaatctttaggttaaactctttttgtaaagcctcaaacttttattttatatgatattcacattcttatgatagcttaatatacacaaaagatcttttcaaaagatcaattaaaataggggaaattaaatctaaaggagttctacaaacaaaattgtccatatacacctttttttggagaatgccaatttggacgaaaatacccttactctatattataagcatttttaaaaaaatttaacattgataacatatagatctacaagaatatagataatttgtaaaaaaaaaattgttatttagttgaaagaaag

SEQ ID NO: 28772 - DNA, 212 bp, Arabidopsis thaliana columbia
taacggccgccagtgtgctctaaaggatgatcaagcaaggttcggtagacagttaacagagaagtggtgcgtgaagtagcaagtacaatcaagtcaggcgagaaggccgaaatggaaggtcaacatatcagcgaagaagagtaggtcgaatatctgctcaacaagtacagcgcggagtcagttccaatgtaacagatgacaagggtcacaaa

SEQ ID NO: 28773 - DNA, 546 bp, Arabidopsis thaliana columbia
cccgctccgccatatatatgtgggaaataatgttttactggaatgttgatataatagttttgacagttatttgtactctttagctgaaaccattttcttaattgatttttgttgtcagtgtgctaatgtcattggtgtaatcaaacccgaagcaaaatcgaaaaccttccgctgtaagctttgccaggtcgattgctcgaacgaagctatgtataatgcaagtcatatttcagggcggaaacacaaaaacaaacttaaaagtcaagctaatctgtttctttaattaaatttagagtaatagatataatgatctttgaggtctatggatttttggtaaggaataatttgagccaaatttgagcaattttgattatcgatcgtacaagttgtagttttgttgctccggaagatttcagattttgatgtaaatttaatcccacaagttataatcatttttgtagtttatggaattgaaattctaaacataattgttctgacaaaacttgtatttttaatacaattttgaaactctgcacatccaattat

SEQ ID NO: 28774 - DNA, 434 bp, Arabidopsis thaliana columbia
ccgatggagagaaactttctgtcaaaagatatcataaattgacaaaacttggaaagtaaagtgggaacatgggacggacgagaatcttggcggccgaaaatgggattatgccaattgttatagcccaaccttctccattatctctctatatgtttaaacactacttctgattaaacgtataaacgatttactactcattgttctgaaaacattactagattttaatttatgctaactcgactaaatatatattagattagatggaagtggctcttaagcaacacttgtctaccacatttgcacatactattattaccttacaatctcaccaaaaggaaaactttattggtcccaaggtaaaggccggttagtctaatttaaaaactctatagagtcttgttgtaaaacagcaattttctacaacttatatttag

SEQ ID NO: 28775 - DNA, 490 bp, Arabidopsis thaliana columbia
tacaattccatgaaaccaaaacttaaacacgaatgtaagatatgtaattgtacacctctgttaatctctgaagatactcatcggaatctgctggtaatctacgcaaagtatacttgtaatcagcgacagtgagagtgatctacaagtagagaataagagattcaatgaatgaattggaatgaggaaatggtgaaatcaatagagagataaggaagatacgaactgagtagatagcgcgagtagaacggacgacgccttctacagccgtcgctattttattggaaggtgagtctcggaagatggacacggcggtggcgctgtcagtgacggcggttagagctaggccggcggtgactgtgaaagcatagatcggagatttggatccccgagaattttgaatttgcggagaatctccagttttgtggattctttgggtttcgtatgattgttttggtagtatcgaagtagaggactggagaagctacacatt

SEQ ID NO: 28776 - DNA, 904 bp, Arabidopsis thaliana columbia
cccataaaactccccaagatcgagcggctcaggggacccgtaaacatccatattagctgaactgctaccgtaatcaaacatcttgaacttaccgctatgtttaatctgtgcaagatgctgagccacacggaaggatatacctggcatatcgttcatgttatagtgaggcaatcccatgactccaacccagtttgagctatctccgccaactacataactcatcaatgtttggactaatccaccaacagcaggatagttatggaaatctcgagctaacttgttgagaagcatccggaagaatttagtggggatgtagaaagcaggaacaatccgagatagtacaggacccaagaaaaggaacgtgtactccatcaacgtgaaacacatgttggagtcatagtgaaacccagcaggcgaaagaaggatcagtctcgagagtctgtgcggtttctcttcgattttacgggtgattacatacatcagaaccgcggcaccgcctaaactgtgagatacaacacaaagcttatacggttgatcctcgtttactacctcttccatagtaggctgataaagtttcagttctgaagttttgatttcgtgaatcttctctatcattgctgggatatcttccgttgcatgttcattgatggagtaacgccagaaactgcatgttttgaggattcatcaataagaactatacaaatatcaaatccataaagaagccgtttattctatactactcactcttttgaggatatgttttttttcacatgatctcttgaaactaaaccacgaaagttccctaggaaaacatcgtagcctggcaagaaaagcagagtaaaacatcggtaaatcttaacttcatatttatcatacagtaacttgggaaactaggaatattttg

SEQ ID NO: 28777 - DNA, 791 bp, Arabidopsis thaliana columbia
ctttctccctcgctttcgccctcgcatagtaaagaatctgaatttcagaagacaggtgatgcttcacttgtgctaatgtagaaaaggctaacaaagttaacagtttggctactgatgatgttgataagagtaaaagtaagccgtttgaggtgtacaaaaggcgaacaaccgttgttgtttctcgtgaaatatttgtaaacgttgtctgtgatgccctggctgagtacaagtatgtgggtcatgaccaaagggcagacttgattctgtcgtgcaggtaaattgcttacctttatgaacatatatgttgctttactaataataaattctctaaactttatagccattatgggtatatatatatgataggaactgtagtcagattttattatactgaattgtcattagaaatgatgtgaacttaatgttgtttgacctctgttatgtgtttcgcttcatcctttcttgcattatttaatgcttcattacattagtcatgccatttatggctgtaactagaatcaatgcatttgatcttctttcacttcacacatcatctaaacattcttatcattttctacagaatccgagaaaggaaagaatctgtgactgttctactgtgcggtactagtggctttggtttatctacactctccgcacttctggtatttttcatcacatgtattataatcgttttagattgacataagatgatgcttcactgttttgttttgttatattcaatatttggttaggtactgtttcacttctttattccacaggctttacaatac

SEQ ID NO: 28778 - DNA, 565 bp, Arabidopsis thaliana columbia
tgaagactaattcggtctgattataagccagtgtttttttttttacctgcttaaacccgatttagcggtttagcggatcaaattaattttggttgaaaacttcttctactttttattttattttttatacagtaaaaaagtaatagagtaaaataaactgaaatatcctttcttcaatcctttttttttttttttttggagcaaaaaaaaaaaatactgaactatccattgaaccatttttgtgtgaaccagaaattctacggatgttttgagcccataaaaaataatcaaaagacaacaaaatagttacataactaacctacgtggtcaaaaatcagccgattgctccaccaaatgggcgccacagataaataaatacccaaacccgtaactttatcctcatctcatcatcaccgtccatttctcaatccaacggtgtacatccctcggaaatctccaacaatatctaatccactaaatcaaaaacagatttaaacaaaagaagattcacaaactcaaaacacagagaacagagagagagagagagacccattgttgaagtgtg

SEQ ID NO: 28779 - DNA, 565 bp, Arabidopsis thaliana columbia
ataccataatcatttacgatataaaaaaaacgaatccttaataatcacttcaatcgttttatggatgttttatgtataccattattagaatatgaatttctaactcaaaactaattagtaataagtgaaaaagtttatatttatatatgtcatttaaaagttttactcaatttctactgtgagatattattaaccctaatattatattaatttaaagtaaaaactagatcatacttagtcaattattatccaatcgcaagaaatccctccaattaaaatgcgtgtagccaatgttggcgaggttatctacaattgaccaaggattgtagacatgcaatatgttgtagttcctttctttcaggttttgaagtctccaagtaaaaccacgatcgccactgataagcatcacattcgccaatgtgcgactggtgcaagtccaaaacacaatcctcctttgaatttctttgtcactggcttgtttttctttattctcaagataatggtactcgaccccattgtcttcctatgttcgttgaatttcaggggaagacacgtttataatttg

SEQ ID NO: 28780 - DNA, 422 bp, Arabidopsis thaliana columbia
aggtttgagattctgtcatcaacatctagtagctagagtgaacataagatttgaagtaatgaaaagccaaaattgtcaacatacagatcataaagatacgaatacgaaaccttagctttgggatttgacataatacatttagccaaaaagtgagcaacagcatcaatcacatgttcttcattcacaacaatgtaatgttcgttatcgatcgcgctttgttcctcgacattactaggaaccatatcatcagtaactaaaacccaccaacttggctcttgatgatccatctctataagaacttcaacagtcttcacatcatcttctacacaaatcaacccatcaacacaaatttctgctaaatgcaccagatcgaatttcaaaatcatcataaacaagcctgttggttccttgaatggaaattg

SEQ ID NO: 28781 - DNA, 563 bp, Arabidopsis thaliana columbia
ccattattataattgcttataaatatgcatataacacaactattatatagttgttactaattcaagttgtagatgctaacattgattcatacgattattagcacatatattacctgttaacacaagttttacacattcgttaaagtttgtgttttttcttctgttattaatcttgtcttcttactatgtaacccatattttattttgtcgtcgctaatattagtattacttgttatcgcggtctgatatcagtacacaagttttatatgatattgtgctttttccatacccgctaacccagttattaacagagttttgtatggggttatcatatattttcatacaagtcaccttagtacgtatctattattataatcgcttataattatgcatgtaacacaactattatacagttgttaccaatttaagttgtagatgctaacattgattcatatgattattagcacatatattatcccgtactcagtaatgttcattttattggataatgttgtatcatacttttctaataatgtgtgtgtacattgctcataagatttatg

SEQ ID NO: 28782 - DNA, 488 bp, Arabidopsis thaliana columbia
tgatatgcatgaaccatcatcatatattcgttgccactagcgttcctagaacacgacatcatattaaacatgcatgatataggtccagatgttaattccgtatgcaccatataatgtaagaaacttttgatacgtttcaacatattgattctgtgtgatggcaagaagacgtgaaactcctacttttgctatgtttgtagctttttgggtgaaattgacttgtaagatcatcatgcagtgcgaaacaaccatatcattttattttgtttatatttcaataatcaaccgcaaaaggcatgaacatgatgcgcttagttcattacttcataattatcaatggtttgtaagaatagaaaatgttgtatatatatgatgctgtagacagaagaaataacgagggtaattttgattcgaattacagtacaaacaaagcaatgttgtaacaaaggtggacgtaattatgcagcacacatgatgtcgtaagtgta

SEQ ID NO: 28783 - DNA, 395 bp, Arabidopsis thaliana columbia
catgctagttttgtcctctgcctacttacaattttcattgacacatcctgtttatgtatgcatgtatgttatagattgatgatgaagagaaaataacgatgattgattttccacaaatggtatctgtttcacaccgaaatgcacaaatgtatgtgacctctcatctctgcaccatgcctcagtactttcttccaaatttctataaaatattcttggtttgttaatgaattttgtctctcaggtactttgaccgtgatatcgaatgcatcttcaagtttttcagaaaaaggtgatttaccaatttgattttccttttaatatatacatcatttgttcacaatacctagtagaaaataatctctcagtcgctgaatccatgtcatgaatgccctgaa

SEQ ID NO: 28784 - DNA, 471 bp, Arabidopsis thaliana columbia
gtcttataaatatataatatcactatgcatattatggagagagaaatggaatgggcccacaagaagaggagttacatggaaagaggaacctgcaaagataagaagaatccaaaagtgggaatgaatggaaacaaatccaactcacatgtgaccaaatttggcatctttaatttttcccctttctccttcactgtctttctctctttcactactcatcagcaaccaaacaaatagattgatagatcctatgtgtatatatgcatatttgttcatgtccctatgtaggaaatatgatgttccgtggccaatatagaagatatctatatctatatgcatagatttcagtcacaagtcaatatatatatatataagagggctacacactccagtactactatagttacaaatttactattcactgaccgacatgttgcattttttaccccgaatctcaagcagaagtgtagagta

SEQ ID NO: 28785 - DNA, 567 bp, Arabidopsis thaliana
ctacaatctcctccaaaaaccctttgcttattggtcccttacacgtatttgtgactcgcagcagcaaggtttctgttttggttttgtggaatttgaaacatctagcggaaagcaaagtgccctcgaggtaaaaccatatatagccttgaaaattctcctaagtcttttcgagctcaggtgtctggtatatgtttcggttgaattagaaagtctgactctttgtgttggtacatgtaggcctcaccagttacaattggagatcgtcaagctgttgtagaggagaagaaaacaaatagtcgaggtaacaaacatgagagacctcatcaagaatcaagaaaaagatggttgatgaagagtttttgtgtatttaagatgtggctaatctttttttttgcaggaggaggcaacaatggaggtagcaggggaaggtacttttccggaagaggaagtttccgaaatgaaagcttcaaaggaggacgcggtggtgggggaagaggaggctatggaagaggaggaggtgagttttctggtagccaaagagctcaaacccacgaaatggaggagaag

SEQ ID NO: 28786 - DNA, 531 bp, Arabidopsis thaliana columbia
tcgaatcctttaactgtggcgaaaggtagaaaaaaaagtgagtgaactgctaagttcagaagtgcgcatgtccaaccacagcatacttacctctaaacccatcaatttactacttgttaggtactttatattaaaagttgctgcctcttcctccaaactattagcctctccctcttcttcgcttagtggttgagcatcaaaggtgtttaaaacaacctacataagcagttcaagaaacaaggtctaagatgatttctcactaccgccagcatgaattttctatgcatatacatatatacaagaccaggtaatgcaatttagtcaaaaaccaaagatcacataccgccaaactggatgaaaatttctgccacttggtagatgcggaagtaagagaagcgggattacagaaatactcctggaaacgaaacaattttctcagtaagaaaagaactatctcaataaactaactaacaaaaggaaatttgagatgctatctccagtaatgttgattttgcatgatatcaaacagag

SEQ ID NO: 28787 - DNA, 553 bp, Arabidopsis thaliana columbia
gtcttgacgaagcaagaatctttacttggagattagtgagagagaaatatgttgaagagatcaaagatctgatatctgagagagataatgggagaaatgacggcgaggtcttcggttttatcgtcggggatgttcagaagttaccaccggccggtgacgacggaggtgagatcactattacggtcgagagtgatgtgccaagtgtcatccgtaaaacccgccacgtattcatcgagactctccacagatattcctctcaacgagtctcctcaggttctacttctcttcactttactacgcatcgatgtttttatttttttttggtgggtttaattgagatttcgaccatcttgtggaatttttcaggctttgttcgatgagtatttagaggataaatcaagagtattcgaagcaatgtttccagataagcccagaagtcataggcttaacgaggtactatcgaagttatagttaactagatatagaggaaaataagtcttcagaaatgggcatttggtctagtggtatgattctcgcttagggtgcgagaggt

SEQ ID NO: 28788 - DNA, 786 bp, Arabidopsis thaliana columbia
tcaatacaaagtactgaggcaagacaaaaaaatgaacgatgtcgcaaaaaaaataggaacctgtcagaccgccgtgcgaccaccccggctagggtaaaccgagccgagtaacgatcctctacagcaccggatgcgtccgaggacaatcgtagccgtcaatcacgctctagccgcacggtcatggttcatcaaccagggtttagggcctgtctcttgagaaatcaaggaaacagaggtacgagcctatagaacagatcctgttcaagtaaggtcgtgaccattgctgctctctcaatgttatatatccggcaacattgtttttcaaaatagcgatgtgggacaaagttatataaagatcacattagaaaagcatgcatgggtcgtgatatatggactaaggcccacttaattatcatataaagcccctccctaaattagcgttgaaaattatcattaagtcaatatgatttgcgaagtataggcgtatagctattaagtgtgataaattcgttctcaattatgtgcgggtaacaaagctatcttcattatatcagacgatgttgaaacttttttttttgtttttctgccgatgtgaagatataacctattagaacaagcaaaggagtcattcatgtcccaatcattgttttatttcatgctatgatccgacaatcttgtcccattcttggattaccaatgatggaacctagaagagctactgatttggcgtgtctcagtgagtggataggcgcgcgttgtgagagctggcgtctggggaagtctcac

SEQ ID NO: 28789 - DNA, 489 bp, Arabidopsis thaliana columbia
atattgattgtgcctttttgctatctgcagtaatattttttcccatgtcgcaccttcgtcattgtgtgtgtttgcctatcatccagataacatgtattaacctgttaaaaattgtttagatttttgctcatgttggaactttgtgtacattcttgcattactaaacatacatttatttatctgtgttatcgtaatatcctccatcttcatgcttactggtaatccatatatttgcattcttttcaattatcatgttattactctgtgccgcgaaaggaagtcatttgtcactgcttttcgattggagcttgcattcactctgttttcatatggttttgacagaataatatcctaaagcttgggcatgctttctgctttcttcccttgcctgtacgaactggattgacagtacaagtcaacggatactttgaggtgtcacaaatcgtcgcggaatttggtatggagaagacatggacaggagtgggaaag

SEQ ID NO: 28790 - DNA, 986 bp, Arabidopsis thaliana columbia
tctctattattaatttgtgatgcgtcgtttgttttccaaacacaatttacgcatttgtattgcgtttacatttaaaaatatcataattttgaaatataattataacaaagtcaaaatgtcaacaaagaaactttctattttcaattttcatttaacaatacaattttttttttttctagtgagcttcttctatgtttgagtattgattcggaaaaatatgcaaaatgtaaaagtaaacaaccaattaatgcacattataaaacaacgtggcagatctaatgattggtaaaacatattgaaggcaggatatgctggagaagatgcaccaagtgttgtgttccaagcactgtgggtcgtccaccacatacgggagggatggtaggaatgaatgagaacgatttatttgtgggagacgacgctgaagccaggagcggtatacttacacttgactacccaatggagcacggtgttgttagcaattgggatgacatggagaagatttggtaccatacgttttacagtgagctacgtgtggctcctgaagaacaccctgtgcttctcactgaagctcctcttaacccgaaagccgatcgtgagaagatgactcagatcatgtttgagacatttgctgttcctagtatgtatattggtatgcaggccgctctctccctccatgccagtggtcgtaccacaggtaaagtaactgcaactcaaatttcacaattcaaatttttagtttgtaagctagaaattttgtggttttttttgcttgcatggtagtaccaactacaacgtcggtagagaggctttactacagtagatattcgaaggcagcaatttaaagtttttacaagcttttaaaaaacattacttgcagcgtagtcaaaaatgtagctggattttgctggcaatattagtttttacgttttgatgttttaaaaatgaacctacgactttaaaacatttgaagcaatttgttttggtta

SEQ ID NO: 28791 - DNA, 524 bp, Arabidopsis thaliana columbia
aaagctgtcactttctgatttcatataaattttagttttggtcaccttgctagttgttactcacttggaaatttgcttccttttccttaagcaattcttggagaaaggttctctgattagtcaattgttcttgctaacagagaccaggaacagtctaaaggtacatcaaatgagaatgaggcaagctcctcacgtcaggttgatgaagaagaaaatgatctcttctggaatgtagatgacatcccaggtagagaaatttctgaaatttgacattttatctttgtgccactctagagagcagatttctaatccagctattgttgataatatagtggacacaaagaatagattggacagttcggttggcggagatacttgtccaagtcaatttgtcaagcctccagcgaatctagttgttcttgaaggtgactgtttggatactagtggtgacggaggagaattggaacctatctggtatagcatgttttccacttcttagagtatgaaaacagaaagagcttggg

SEQ ID NO: 28792 - DNA, 458 bp, Arabidopsis thaliana columbia
gaggatgaccgcagtttgagcatcacatacgttccggctatgtcgagcttgggtcggatccaacacaaattcaaacgaaatgaagcaacaacgttattttggaaaactaaacacaaaatcattattagcacatgtgtaaagtatcatcaaatcacacgagaactaaacctctacaaaaagaagacacaaacttgtccttagatttctacagttagaatgattaatgaaaaaacaatgattaacatttgacataaacagttataattgaacacagaacaaaaacttaccagggagttctcgtctggagaaaaactaggaggaaaaagaaagaacgacaaaaaaaattggattcaaaagttgtagggttttacttaggtctgggcgtttgattatcgaatcgaatttggtttggtgttttcggatttcgagtttttggaaatagattctaattaatatct

SEQ ID NO: 28793 - DNA, 484 bp, Arabidopsis thaliana columbia
gcagcccagaccattctcgtcaaccaacctactcgaacaccagctcgaccctctgatcactccgcagtcaaccagacaacctgatcattggaaagacaagagaacagaaggcccaatcgaagcccactaggaagcccactttgagtcgacactcttagagtcacacgtccatgaggccgttaagtgggctcgaagcccgctttcttactcttagtataaataagtctctcaagggtttcgccctgagacactgcacttctagagacacgagtttcgcgctattattcagcaaccgcgttccattcctgcaacttcgcatttcgatttctcttctaagttactcagattttgcttgcatatgcctgttcatcttcgtctcattgccttcaatctcatcagtatgcaatcttcaaccatctctatgttattgtctttaagcatgtcgtctgagtagtgagcaggatttctgaggatgggatagagt

SEQ ID NO: 28794 - DNA, 849 bp, Arabidopsis thaliana columbia
tgttggagaattgagagtctcgagagccataagatttaattctgtgagatgtgatttcgagctatttaagaagaagaagatgaagaaagagtgaagtgtgtggtgtattgtaagcacgtcttgtgtttgtgttgtgtttgtgtttttgagagttagttttgtgttatatatatatttcttgtaagaaatctttagaattgggattgagagtgggaacgtgggctatgagtgatcaagtggtgctgctcttgctttcttcaatccattaaattcctttattttatattgacatatagatgtaatatgttgtcactaattttggattattagagtaactatttaccaagtcaatgcagtgtttttagttagtaactgccagaactatgttcagaaacatcttcaattttttacgttgaattgaaaaagattacaacactatgcgtcactaatcactatatgtagtaggttgaaaccaaaaaataaaaaatcacagttacgagtttatttactaagctaagtatgccacataactgaatttttgttattgatcattggctgctaagtgctaactaagtatacttattattttttactttgtactcactcctaattaaccgtttatagatttcgtgcttgttcaatggttttattttctccacttgcattttcttaaatttcccaatcaactatatgaattacccattaatttcaaatagtcagaagacgaagtttccaccaattgtcgagaattcttcaaaagtttttagttaaacaaaaaccgaaattttgtatgacttccaagttgattctatatcacacttttcgtggtagtcaccaaactttatatac

SEQ ID NO: 28795 - DNA, 961 bp, Arabidopsis thaliana columbia
ttattaatcattttattataattgggatccaacaaacatcaacattttattctttgaattacaatgtttattataattatcttcagaaaatggtaagaaacttataatatatatatatatatatataagtatatttattaaactaagttgtttatacatatatataccttataagatactcaaaacctataaaaaaatttacccacaaaagaaaaacataaaaggataatcaaactacacctgattacgggaaggtttttggtttcatagttctttttatgtacataaaaaaaatgagacccaaatccagtgagatatgaaaagtacaaatatcttaaatgagaaaaagtcattatttcattgttaattataattttaaaaagataaaatataatatgttttgaagatatatcatcaaaatacaatgacttttttcctacaagtatatacaaggaaacaaaagagctaacgtgtggaaaaaaaaaaacaattaaaaagagagttgaatttttaatatattcacacaacttgtaatagattagcatgtttgtctacttcgaatactcttcttcaagtcaaaccatatgattctcacacgcagcctcgctccatacctcacgttataactttaaaatttcgtattttcttgactatgctccatttacattaagtcctgtcatattattgggagaaattgtatcatcatatatctagaattctcatatacactgtcgacatgttatgtattacggtataaagaatattgcaatcctatattattattttttgaatttccaaagtttaatttaaaattaagaaaatgataacaaatccgagtaaagtcaacaatttccttcgaaaatttatgagtattctgctgcctatttcgcacacccaccaatcatattgtatgcccttgaaccaagtaatagctatgaagaataacaaaagtagaaaaata

SEQ ID NO: 28796 - DNA, 573 bp, Arabidopsis thaliana columbia
cctctctgaagatagaactgagaatgcgagcctggaaatgccatagcttctctcccatccatgcatttaaaaccctaaattacaattctttaagaatctaagagattttttaaaaaaggaaacttttttgaagaacaaatttatctaccacccagaaatcgtaaaccctaataacccaaagagtgaaaagaacaacaatggcggcttttatatacccagtaatcaaagtcgggttattttcagctgtgagcttaagatccaaactgtttttatgaaacctagaaaagaaaaagaagctaaatgttgagttcacttagaactcaaaaagaaagtaaaattgcagatttgaaatgaagacaacaagcaaaagtagctactactactgttacagtctctctggtagagaaagcaaatctcagacaaaaaaaaggaaagaaaaaaaaagacgagaaaggaagtgaagaccattgtttctatttatatactatttctttaattaattttgtcaaaaaaaaatattcaattggcttcaaaaaaaataaattgggttgtttaagaattttttttattaaa

SEQ ID NO: 28797 - DNA, 480 bp, Arabidopsis thaliana columbia
cacaagtgtttctacactaacgcagccatgaactatgaagtagcgtcatttaactgctaaagatatgagaaagctaaaaaaatcaaacttgagtatagaagcacagttttagacaaggttaaaccattaccttacgagacatgatagcacaagatgttgcaccaatttcatacccaaaaacccatgctccaagagctggaacgagacacctgcaataaatgacttgttacgttcttacgttcttagcatgctctttagaaaaatcagtatcatgtgcatatccaaaagattcccacttgctttcagcagaaatagtagtaaccaacaataaatagcaaataaacaaaacactctgggaccacaaattgatgactaatcaacaagagagaacgagagagactcacggaggaatggctgcaagaacagagtagttctctgggctgtggttttcctttacacaaaggttcgttttcagcagta

SEQ ID NO: 28798 - DNA, 534 bp, Arabidopsis thaliana columbia
ttcaagggcttgaccgagtaatggaaccaactgatttcactcttggagtaaaaggagcattatacccagaccggcgtggaaggcacacgaggctcaaaggtcgactagaaacgaccattagcttcgtgcttccttcagttctcgcgcttgtaccagaagatgttaggagaaacatggccaatgcggtaagaaactgtcttgtttcatatatgcgattggagactcaaaatgctgtgttccgggtttatacatgatttatgtttttgattggccctttacagattttggccggtttggtggataacatgaagcatagggttattgagagcttggtcgctgattatagcaaattcaaatatgaaagaaaaaaacactagtaattgatatcaatgtttgatcatgtatagttctagatccaatatatgaacaattgtgcgagatgtagcctcgattgtttgaaataattgaggcgttttgtctcaatgtttaacatgtatagtctggatttgatatgacaatttaacaatatcgtgc

SEQ ID NO: 28799 - DNA, 342 bp, Arabidopsis thaliana columbia
tctgacaccataaatgatattgaatcaatacaaaattgtcagcataaatggtcagtacccaaaaagaaagtcagatcaagtccaacaattataagtcttaaagtgtttcttgatggatcaacttcatccaaattaacaaaatggtaaaatcatcaatgtggatttgcagaacatagcttctatataagtcgaacttaactcatttcaggtgaccagatcaattaaaaaatgaagagagcaaacaaataaacaaagagattcaaaatttgtaagcattcaagctcaggttcggaggaaacccttgtttgctcaaattccagattcatgagtccacattttagg

SEQ ID NO: 28800 - DNA, 528 bp, Arabidopsis thaliana columbia
caatggtttatctaattaccggaagagagagttcgcttgtagggagagaaccaaagtcgtcacagccggagaaatcgctgctccggcgaagagcgtctccgtcgtcgttgggttcctcagaggaaacacggaccatctcatgttgagccttgaggtcagtttcttcgtcggcaaaaacgtcatcgtttgacaagtcaagcaagtcgtctacagagaaatcgtcgacggaaaagccattttgagcggtggtgacggcaagaaactcttcgtaaaccggagaagtcgttttgagagccatctctttcctgacgctgctcttcaacgcggcttgttccattttcctatcgagaaaaaaactaaacaacaaccagaaaaaaaatgaaaaaaagaattcaatacttatgtccaatttattcacattctttttcaaacgaaacgtaaaaaaaaacgttcctctttttcgcaattccaagagagagagaaggaataacaaaaatcacgaaccccaaaaaaaaaagacgaccgggg

SEQ ID NO: 28801 - DNA, 915 bp, Arabidopsis thaliana columbia
gatgaggatcgtaatcactcccgcaggtgaagatcatcattcctccagagcttggaaaggaaagcggggaacacatctaggagatgattaactgcacttaagaagttttcctacaagataaggtttctaaaaccccatctagaagaaaacttaccgtagaagtcggggcaggatattacgacatcaaggatgccaaaggggaggtgatccctgaagctcctccccattgaaccaaagggttcctaaacgtcaagccaacgacgttagacaagcgcgctaagtgggaggcaatccgctaggtaaatactttccttaggatttcaaatttgcttttgcctttgatattttcagtatttgtttcacgtttttataaaaacacaaaagacaaatagaaaattagaaaacagataaacccaaaaagaaaagaaggaaggaggtcacctggacccgtcactaggcaccgtgaaaactggccagctactcgcccgagtaaccagcatcgcctggataggccggcctggtcgtgccaaactttggacagagcccgctgatgtccgcttacctttggctagagtctgacggatcgtgccacatcttcgccggatttgctaccgtggcggcccgagcaacatcttgcccgccggtcccgccgaacgcaaactcactccaacgacagccaacaagtgaatggattagggaagttgcaccgccatggtcgatcgggttgccaatggattcgtttaacccgcgaccaatccgctcatcttaatgaccggcgacacactccaacacccggccgttttttgcccaccaactccacactttcggctaggcaacgtgatagtaggatttttacacaattaattctaaaacgctatcctgtcattgtagtattttaggttgtcaatccaatcc

SEQ ID NO: 28802 - DNA, 525 bp, Arabidopsis thaliana columbia
gctacacctaaatcaaccaccgggatgctcttcattttgtatttagaaagaagtaacagcatggtcaaaaaggagttctctttctgcagagccaggaacggtgcccagcggaatgttccagagatatctcgaacctgtcagagagaatatccaacgcatttcagaagccgtaatcaggagaaaaaagtcaactgaaatcaggtccttcataaaaaaacaagcttcaccttggtgttcttgtatagctctgaagaagtaaggacctcaaagaagtttccagaagttactgctgaatctccgttatccagaacatcggtggtgaaatcatgagaaaatccatttgaagctgcaacagcagggctccttggagatggtggctccaactgttttttaaaggagacaagtagagtacagacatgaagtatagttcactaggtaccacaatccaatttgatcatgacaaaaacaagtcgcctctcgtattttttggagaacaattacctgatgcaaaagccagacaacaat

SEQ ID NO: 28803 - DNA, 628 bp, Arabidopsis thaliana columbia
taacaagtaaatcgtagttgagccacctaagcttgaactttgtccaccaaagttagaccaacaaagaattcaaaacagacgtttccaaatgtcttaatgcaatgatgaagattattctacttgtaaaatttatggatgtttcttcactatgggagaaatagcgatttcttgtttaggaaacatcatatgagatacaacagacccattgaagtttggactgaccaatggcagcaaaattttatatatttctacggactttttggtgttgatggtttaattacatatctccatcagacagtgcctgcgctcaaatagatataaagatcattttcccatgtttcccataagattatctatcagcggaaatgggttaccttcagatatatcggaaaggttggttctgcctgaaacttgaccacgctactggttgctgcttcaatatcttccactgcaatatgaatgataccagaagaagaacccaataaagtccaaagttaacatcaaggcttcaatcatgtgcggtatctaatggttttcttacaaatatcgtcattgctacagcgctctgaagcaattatctcttcgtgtggcacggtgaatccagtgaaagagaaggatagtcaagaga

SEQ ID NO: 28804 - DNA, 542 bp, Arabidopsis thaliana columbia
tgacgtaggcgagtggttctttgtttttactatgtaggcacgactttggtaacacctactaattaactgccaaattttaagttttgagaagtcggaagagttcaaaccagttttaggtttcgatatgtctacatagttcaaagatgatgtagagtggaggttctttctgcaatagttcaatccgtatcgtaggggaggaaagatagttttcatttagcaacgaaagtgaaaactaaggcaatgcaaaagtagcaaagacgctcgtcatgcggtacacgtggcaatcttgtcttcaaaacacaacgtttttattcacatatttggtttttttgcatcactctcgtttacccccaaaaaaaaaaaaatatctggcccgacgaagaaaaagtagataggcacaaaaaatagaaagaaataaagcgagaaaaggaaaaaaaaaaatagaaagagaaaacgcttagtatctccggcgacttgaacccaaacctgaggatcaaattagggcacaaagccctctcggagagaagccatgggaagaaaaa

SEQ ID NO: 28805 - DNA, 520 bp, Arabidopsis thaliana columbia
aatccacgttgagttccagactttagggtttagctttcttccattaaaaatcgtttaatttgattgattgggttaatcgaagaagacgtgttggtggcgaagagagttaaaaacaaaagagagtattttgatggacattgacaaaagtgatggtattgacaatatggtgtctatgaaacaagtgcaacaatgagaaatgtgaactgaggattgaggattttcgttgccggaaaatttgtcaaagacgatgaagtgtggttatcactctaaaagttcttttctcgtactcattcttacaaaagtcccatgttatgtcacctaagagagataaccatcttaattatcattgattagttagagttcaaaattaattattgtaacttggcataatggcttctccttttttaactgggggcttttatggggtatgcataatttgggccaaaaattagaaaaagagaacatttcacttgggcttacacagatcggcatatttttatcgacaaaatgacaactttgc

SEQ ID NO: 28806 - DNA, 886 bp, Arabidopsis thaliana columbia
gggataaatttcaagagtttttactttttatttcatgtcaaaaagttgtatatttcatgcttttatttttgtcaaaacgtttaattttgattgacaatttttaattttataagatggacagaaacacgttttccaaaaacaacaaatggacataaacacattgggcttagccatacaaagtggatacataaaatagaaaaaccaaattaaatgactagaaataaaaggactgggcccgagaacgtgaaagtaagcccaacttacatagaagtccaaaaacactaaaactttcatgttgttaatattttccagtttgcattattttacacttatacaaataacaacagatgcttgattctcttggaatcttcgaattctctgtctttaagactttacaaagatctcattaattaccactttaaccctgaaatctggtcacgggtctgggtcattttggtcacttttatctctaatcccacaaacgtaccggcaaattcttccttttttttctgctcgacggtctctcgaggacgcgactcacagtcacatcaacagcatgcattcagaaaaatcaaaaaacaaatgaattatatgataaataaaattagttgatcgaggaatcaacctaaattctatagtttataccttgacaaaaagatagcatgaaatcagcaaactcatgtaatataccaaacataccataaaaggtccggtcaaaaatagaaaaacacgaaaaagcattataactaaattcaaagttcaaacataagactcaaagagaagttattagagaccgaatatgccagaggatttgtatcttcttctttttttactatcaacaacaataatctaaccttattttttttcactctttattacatgcata

SEQ ID NO: 28807 - DNA, 581 bp, Arabidopsis thaliana columbia
attggttttgaagtaactacaagttacctgcagaatagacagatgagtttgaagacattatgggaatctggtgtggcagtaagcagagaatttgtcaaaattgagcaattgcaataaaaaatctttttctttacttttgagttcagttgatcagtttttggattgaagggtatttgctgttgggttcggttgcctttacttggcagttgagctcagctgaccatgaattcagaatccttgtcatcttcttctcttttgttggaggttccgatgaagagcaagaagttggaaacaaatgatgggtgaatctctggaaatgtaaatagggcccaataattgaaattaaaggcccaaacgagtaaaatctgaaaattgttttacagaagcggtctcatattttagatataaacacgatcatcaccccaaaacttttcgtgatctgggacatgcccaatttaatattttcattaaagaagaagaaaaaatagctaagtctccaaaagttctctacctgttctcactttcaagtcatcatcgtctctctctctctattgttgctcctctctcgctttttatgtgac

SEQ ID NO: 28808 - DNA, 784 bp, Arabidopsis thaliana columbia
gatcgcctgatttatacctggctaaacgcgtcgggccaggttatcgagacagcgtagtttcacaatgagcgcatgtcctcaggttcgatatcatccgctacatcgccgtatagaactttttgctcttcagtccattcatcctgtttaacaaagatccaaacattgacactttgaattcttgttttaagttttaaaagaagctttaagaagaaacagattctcaggttgaatatctttcataccacactttgtgcagatctatcatttcttctgacggttgcagggtgcagtaagaactcttcgtctgagtttggtaccttcactctaattgccttgagatacttgtcgtatgtcacggccgttgatactgtttttaacataaaatgcacagaaaagaaagagtcttttaacttaattcatgcattgatactaaaagagaaaggaaggttttttgacatggttggttgtttaccttgctggcgtatcttggcgcattgttgcactacacatacaccaagatcctggaacgttctggcaacgtcacttagaggatccgacactacttcaggagttccgctatcccccgaagcagataactaacaatcaaaaaggaatttaagaaaaactgtttagaacaatgagtccagtaatattactgttcaatcacctgatataacaaaagaattagatgaacattccaaggacatcaaaatagcttttcattcctaaagtcaaaagctaaatattcaactgtgttgtttcatagaactgttcttgcaaatta

SEQ ID NO: 28809 - DNA, 588 bp, Arabidopsis thaliana
ggtggtggtaagaaccggcggtctggtggtcgatttggtggccgtgactttagaagggaagggtctttcggtagcggtagaggaggctatggcggtggaggaggagggtatggcggcggaggaggctatggtggtggaggaggctatggcggcggaggaggctatggtggtggatatggtggtgcttcaagtggtggatatggtggagaacctccaagtgcttgggactaagcttccaatgttctttttgttttggttacaacttttgacaaaaaaaatatttcttctacattcacaaagagagtatgtattgccccttacacctatgagatttcactcaggagatggatatataacaattgttgatgttttaggtgttttgatctttttaggctattattaggggttgtcataaaaacagtcatcagtttcacagtttctttataattgaggatcaaaatgagagaagattttgacagatttttcccgaatccaactcataaatacgtctatgttacttgtagtcactaaaatgtagtttatatttaaatcatttgatacgtatttaaaatgtgctagtgagtaatt

SEQ ID NO: 28810 - DNA, 361 bp, Arabidopsis thaliana columbia
tatatatgaccccattcaaaaataaaatttgacgcccatcaaatcttaatttaagaaaaaaccactaaacaaatattatatatcaaaacaaattagtaccaataaataaataaaaataaaattatatgttttgatgattttgctcttatattataaagagaaacatatctcatttatcaacttttaaaactatagtagattttttttctttacaattgcattcgttgaaagaaacatagatgaagacaatctataattagtaaagcacatacaacatgtaagaaagtgatgagatcaataagcatacctgaacatcatcaagacaatcagaccaaaaatattatgaaaggagcctataaca

SEQ ID NO: 28811 - DNA, 406 bp, Arabidopsis thaliana columbia
atttaattttttgtcaaaccctatgagaacgaacctaataagcatacatcaaagaatttgtccggaaagcctcctcatagttcttgtgaattactccgacaaacattattcatgtgtcattgacccagacacgtattcactcatcaggatttgagtttgtaagcataaacgtaacgaaatttcctcgatcgtcattgctttcggtttgactcaccaaacaaacaagtgaaaaattactaagtaattattaaaccatcatgaccatcacataacgacattttttataagatgtgtcggcaacagtgtaaccagagagggtgtgtaacggtaaagaatagtaaagtaatccatcaaagtaatggcaaattaatcaacgtccgatccatgatttctatgaccggcttga

SEQ ID NO: 28812 - DNA, 567 bp, Arabidopsis thaliana columbia
gctagcaaatgaaaaaaatagtgttttgatctaattgaatggaaataagcagcaattgtttggaaacactttttttttattataaaaaaaattaagaaggtggatatgttgtagaagtgcgtataaccaaatccattaaaagatgtttaccaaacataaaatactatctactattgtggtgcatgctgtaccgcgatataatcacaaaagtaaatatacatgatcaaaaagtaaaatttatatgtaattgtttaagtattgggatgaaaccatagtttcttagccatttcaagaccttagtcttaaatcagaatatgatcaatgttattgaaagcaattttatccaacaattgaaatattcatttgtctcaataatgttcaataatagataacaaaaattctacatcaatacacaacatgaaaaaaacggacaacgcaaagaaagttcagacgcgtgttaccgccaaatcagatcagcagtttccgttttctttctttagaaccaatgagccagaataaacgctcaagctttctcataatacaacattcttcagactatacttggag

SEQ ID NO: 28813 - DNA, 435 bp, Arabidopsis thaliana columbia
taacgacttattttcattataaaaatcagatattgtttttcctatatagcgacttattttcaattataaaagcagacattatttctcgttttaaagaacgagacgtgaagagtaaagtctaaacgaatatgattattgaggtcattttcttaattaaaatatgatcaaatagcttcgactttacataataatcataaatatttgcattaggtatatcatctaacatgtctactgtctacctacacatttcatccactttctcccttcgcttccccaacttgtgatttaattgacataccggtgctcaccacccaaatccccttcaggacatatttccccattcacacccaaatagtctcaatcagtttttgattgtcttatctcgaaattcttgtgaatataattaaacttttagaagtaatattaaaagagagg

SEQ ID NO: 28814 - DNA, 515 bp, Arabidopsis thaliana columbia
agcaacggtgacaaacaaaggattcaacgaccgattgtatttcggcgatgatattctcaccggaatcgatgctcaacggcgaaggttgatgtcggaattcttacgattactcatccagcagcatgtgtcgcgtttgtatccagttgctgacacgtgggcttgggtggagtacaaacgaattttcttatgcagaaggcagttatcggataggctcttgttgggtctcaaatatttctgtaaacttttttgtgggacttttagtatagcccatgtatgatccagttatgtttaatacgatactacacttgcgaaaaaaaaaaaacaataaacttaaaatgaaacaaaattcattttcttaggcggcgacattacacaacatatggattcatcaaagagttaaaaagaccaaaagaaaaaaaggactaaaaacagtttgcttcattcactctcaacatctctatcagtctttctacctagtgtaccatttcaccagacaaacaaaaaattgggcattg

SEQ ID NO: 28815 - DNA, 567 bp, Arabidopsis thaliana columbia
tatactggttagtttgtgagaatgtgcattgttggaaacaagaagggaaaccgatcattgaaggaaataggaacttttatgatgactacatgtttcattgctaattaccaatccgttcaagtttgccaggtacatgcctctctttgatttagtatttcctaacacttctatcgcttaggcaacactgatttatgtcattaaaagaactctatcctcttgatgacatgtggatagctatttgttagagtattaaccatagtttttctgatattcaacctttcttataaatcattgcaggctgaatatttcagacagttgcttaagcctgtaacgtagtctagcgtctggagttttcggaaattggggttttgagcggctatctacttttgatttcgaaaaaatttactgtgagttgttaaagagtctggtattctgaagagctgtctgtgggggagcttctggtttggggggtaagggctctggtggaaactcgtgatatctttagtatgatggccataacttgatatagcatttggttccgtgtgtcaacttagtgtagtagtactg

SEQ ID NO: 28816 - DNA, 501 bp, Arabidopsis thaliana columbia
gaaagataaaccgattttggaagacgtagaaaaaaagataacgattcatatggacgattagttgctaacaaacttgcatacatccagtaattttttttttgtttggttttaaacaaaagaaactgataatcaacgttcataattgaaagccaaaacgtcttacaagttacaagtgatcataagtaggcgcaaggaatctcacgctcctacaaataatagcaggcctaaaattaaaataaaagaaaaaaagtttggaaaaagaaaaagaaaaaatccattgcagattggttcatagtcctgcatgattcactagggccaatcctaaaagcaactaactcatttcactttcacttatgattagatggtgatgatcatctgattttgcacatttccatgtgacccactttttgtatcttaaaaaattccaaaagggacctttagaataaaagagagggtcctacacaaacacatagtgaaggtgatctatttaagcaccccata

SEQ ID NO: 28817 - DNA, 538 bp, Arabidopsis thaliana columbia
gatattttcgatttttttttttgtcgtgatattttcgatttctattaacaaaacaagtaatacaaaatatcgtgatgcacaatccagtcctctattatctaatacacgaaattgaatgtactaacataatacatgatccctccagattttgtagaaaaataaaaactcgaatatttctatccacaaaggcgtatatacaagagttttatgtgagctccaccaaaaaacaacatatgaacgtaattaaaattgtatatttaaatttcgtccaaatcatttgctgatgcgaaaacctaatccagcacttataatggataataataataattatatattaataaagaagatatatccgtcagcaacattataaaaatgtagaataaagttgcatcaggatgacgaggagagtaaaggtgagaccatgaacttaacaaatgccaagtgtttctgactcagctttgaatgtgacgtacacaaattaccgctttttagtttttacatgcaattacactaattgttactaattctgttataacat

SEQ ID NO: 28818 - DNA, 621 bp, Arabidopsis thaliana columbia
cagtgtgctctaaaggggctctaaagaggggatgttataattagtgactctgtggtacaatacgactttggcaggcagtatcctggtggctttgaaaagaaactgggcgtcagggacacgcttggacgaccaaaccgagctatccgttcaatactggcaagtctccaggcaaggcgatcgtgcaaagaccttcaagataagctgctacagcatctacaagctattcagaaatcaccatctgattggcaattcccctctattgatgacatcctctttgaagcttcataccaacataagcactatggctttacttcacccgcgtgtccttgtcttgatagcatgtctaaagatacctgcaagacagctgtcgaatcaccttgtacttctctaggctgtgatatggaccgggtatgtcgacgtcggcctagcacagaacactacagcccaagagtacatattgggacagttgcatccgctgatacagtgatgaaatcaggcgaacaccgtgattgtttggtccagtcagaaggtgttgttggtttcgagatggagggtgcaggggtgtgggacacatatcatgcatcattataaaaggggtgtgtgctatgcagatagcacaag

SEQ ID NO: 28819 - DNA, 852 bp, Arabidopsis thaliana columbia
aaaaagacttgcctctttgctcagccacgatacttgaaggatttaggaaatagcgaagaacatagccgagaccatcctcagagagtaacaattcaggagttagcttgggcctttgaactctcgtcttcgtcactttaggagcaggagctattgaggttccacttttactggaggatctctgaaattcattattagggatttgagatggagcggaagaagaagaaacggaattattgccggcgaccggagccgatgatggacaatcacgagaccaatgaccgggacgaccacacttgaagcatcccgtcggagctgattccatttcagatttcactcttcgatctctctttctccctcttaggtcttttatcattccaccatcgaaaattatttgggcggttttcactttttctttagcgggaaaattagacgagtcgggtactgtttgacccggtttattataaaaacctaaagaaagagaagcccattaaatacaaattttggaaccaaacatattgtaatttgaggccttaaagcccagtagaatatattagtaacgtagtagagaagacagagagttgcaaataatgtccagaaatagtattattatagtccagaaatagcgttttttagcgggatgatctatcaatactggcaaaaattattaattttagtgtgttgtgggacagattaatccacttcaagatcattacttgagaatttatttacaggatttttaaaattaggttatacagaaattcgaaagaagaaggatggttctccatgcttttgggaaaaggtaagagtttatgagagattgagattattacacaaaatctaaacttttttttt

SEQ ID NO: 28820 - DNA, 1041 bp, Arabidopsis thaliana columbia
tttaattttctttcccgtatagaacccaataaaattgcagatagttgcaagtagatttacctagcaaggcacaacttcatagcccaataattgccttacggaccaaataatttctatatcattatatgatcaaattatgatcaaagtctccaaaatgctcaaataagtcaataacttaacttgtaaaccaatggtcactaacagctttgagtttgagtatgattaggacatactcctcagtcctcaatcttcccttttgtcttaaacatgtttttcaagcttttctaattaaattcatcccccacatacatataaataagctattcttctttttacttaattttagtcattcttaataaccatacaaacttttattccaaacataatggtcccatcataaacgtcaaatgctctttgttccatttgcagctcaacgtgagacaaattattagtgggtcactctcgcttaactgattctttaatatgcacaataatctggttttcattgtttcaactattatgagtataagcattatatcgtttaggttcataccctcctcaatgatcttgtaatgttataaattttgtataaacctttatagttaggtaagtcattttataatttaaggtaacacattgtaaattttaaaggaaaatcaaacacatattcatagccataactttgtttggttgcaaacttgcaattacacgcatacacctataagctatatcgatacacgacacttttctctactttttaagtgttaggtttctgatggcgcgtggacaggacgcgtcgtcatctgaaaaacaaatgacaaaaaacaaaattggcccaccactaaattcttttgtcttattctcaaagtcgtcaaaacatttggtgggcctcaagccacgtgtttcctccaaacggatcattccttcattatttgcttgattaataatttattaacgtttaatgaactaagattattgaactaagattagttgcataagattattgaactaatgattggtgattaataatattgttgttgt

SEQ ID NO: 28821 - DNA, 440 bp, Arabidopsis thaliana columbia
tgaccataatcgaagtaagcaaatcagtggatcatcttaatcggaaacagtaaagcgacgaatctacaaagcattcactagtatcgagtttaaacacataacagcaaagtcaaaccttaggatgatcgacggagttggcctgagtaaggcaagagtagcgtgtgcgattgtatgagccgtggctttagaagagcagtagagaggcgtgatggcgaaagagactctaaggcgagacagcaactggaatcgtacgaaacaagaggagagagacgacggagaagaggagaaagagcggaaatggaagcgagaagaagaagcacatgacgttaccaaagtgaccgccatttgagaagtctccactgagcttagcttctttatatttatttataaggagaagaacagagtggctgatgcagacatatatatatatatatatatat

SEQ ID NO: 28822 - DNA, 574 bp, Arabidopsis thaliana columbia
tttatattcagtaataatttatatgaattgcgaatattctattttctcagtaagaagaactaaagaagacttttattcaaagacaaaaccgggtttaaaacccgattttttacaacagaaattccattcccgaaacccaaacaacataaggtgagaaaaaaaaacaacaacaacaaaagaaacaacagagaacaatacagaagaatcaaacactaaggtctttgtctctggatctagaccattgtccagagattattcataagaacatacgagaaaacacagaagaaacttgagagaagaaaaagaaacacaacaacatcaaagttacagactcattatcatcattatccttcacttcttcaatagattcctcgagaaaatcctcttgcaataaggattattacgtagaatcgaatgtggccttatgacttccactagtgaagcatgaagtggaccctgtcacaaatttcataaaccgatatataaccgaaccgaaaactggattggaatgtaattcatataacttgtacgtaaagtaaagttagtacctttgtggcagcaagagcggcttgga

SEQ ID NO: 28823 - DNA, 733 bp, Arabidopsis thaliana columbia
ttttcttatgtgcatattagtatgtatgtaaagtttcgtaatatggatatacacatctattttaagaaataattttaaagtatgatattataggagatttcatcatataatctaattatattaattaaaaagtaaatatacaataaatttatatagaaatgtggcctctaaaatgttaataattcgttattcaaaatcgaatatcccgatccggtccagtagataacattacacaaattaggccaacacattcattcataccgtggggtttatgattatatccgttttaaattctaaccaaccaaaaaccgaaatggtttagtaaaaccggaaaagcaaaagaagatccttcacattctcatcatcatcaccacctgattcatcttcttcatcattcacccactacactgttgactcttcgctaaaactcgatccttcaacgatcttcgccaccaaagcaaggtactttcataaatatctggattttgattacaaaccccttctctcgtagtttcattttaatcgatactatctaaaattgctgttatgatctctcaatatcgttgttgtgaattggtaatttagtgtaatttcgttgttgggttatgcagagagagtgagatgggaactgtaatcgaaggaaagctaagattttgtatagatagaggaggtactttcactgatgtatacgctgagattctaggacattccgatggtcatgtgttgaagcttt

SEQ ID NO: 28824 - DNA, 758 bp, Arabidopsis thaliana columbia
tcatacattctacaccataacatacatacctgtccagtggccttagtcagtgaagctttcgccaacagattcttcgggagctttgccaactgagcctacacacagcgaatactcataattagagattaaaaaaaaaacatctaaagctcatcctaataacctcacattgtgtttcattgtggtcttattacatgaaacaggaggagataactagtttccaatgaaataggacaactacgaaactgttgcacctatgtttgaaacaattcaccaaatccacattttctatcatcagaatcaaaccaaaccctaattattcaacctagatcctatttaatccaacggtgactaaatgagcacgcgttaaaagggtttgaagaagatatacctgagaagaagacgattgacgcatcagatgaagaaggttagcagtggaatttacggcttgtgaaatctgatcggcgacgacagctttcgccgttcgatcaccgccgctgattcctcttgaattttccgatgccgtcgccatttctctctccaagtttggttggttctctttttttaacaaatggtaaaatataggtcttacattgtaatattataaactcttagtcgttcccctattctattgatttatatcacgttattcccaatatttctatttctatcaaattgacacctcccatatcaaaccggaacgataaaatgcaacttaattttttatggtatatatataagacatatatttaagaatattt

SEQ ID NO: 28825 - DNA, 575 bp, Arabidopsis thaliana columbia
tccatttttgcttcaattttgcattcggttttgatagcaccgaccatgccttggataagttatcaggtaggttgttacggtcggtctattgttaataccaataaactggaggtgtaatcttgtataccaagttcttgacgaatgaaattgtgttgagccaaaaaagaaaaaaatgacaggtagcttgaaactagaggaatacatctgtgaaccgaataaaaagttataaactctcaccttttcaaactagttttggacttcaaacaacaatcagaaagaaaaagtaaaagtacaaaaaagagacaaaatcgttggcatctgaagtacaggagatgtttgttgtgtaggagaaacaaagatcagtgcatagaacgagagtaatggttgtcattagggtttcttttctggctgaaaaccgacatagcttttctcacaggaggctgcaatggcgcctttctatcactatgatggttcaagaacacatcatctgatacgaagtactcatcaccctgcaaacaacagcataatttaccttaagatttcaatcaaagttacagatttgagtttgagataga

SEQ ID NO: 28826 - DNA, 913 bp, Arabidopsis thaliana columbia
gttaacaaagaaaaacaattaatagttcttaaattttggatgacaaaaaaagaatggtaacatataaccctaacgtattttcaaagttgcgtttttggtgaagcttatactgtatacagtactagaaaaacaatttgaaatgatcaatatttaaaagaagaaaaaaaatgtgtacgtgagatttatctgaaacttgaaagattctataatcggtaacctcattactacaagaaagtctacaactaattattaaattgcaaccgacaatcatatagtgttagatcataaatcatattcataaacaaatatatcgattttaataattgctaaatggtatgttttagtgacaaaatttatatcatcattacatcgcattaattaaaatttcaaatttatatctacttagacgaaatttcactatcagaaaatatcaaatcaaaatgaataacaagaatcaaaagcaacatcactccaaacccaaaaggtacgtagataaaattatataatcataacaatcaatgcaaacaattttatatataaaaaaatcctagttaatgcgaatatatgtcaggttttttcttaaataaaaaaagttccccaccactagtacataaacaaacaaattttcaattttcccaccaatcaaatttaacttgtatattcaattctacttttaaatcttgatataaaagaattcttgtagtaaacgagtcacaccgatcaagaaaaatattaatataatcatataaagagcccaagaaatctcaccgaactttcattttactcaatccctctctcctctgtttttcttctataccaatcttctttcttcaagaactttcaaagtttactctttagttctccattagaggatgagattcttcttataagtcagataatggatctatcaaac

SEQ ID NO: 28827 - DNA, 597 bp, Arabidopsis thaliana columbia
taagcttgtgtgttcactgtttcttcttcttgttttgttgttgttgtttccttttctttcttgtacgtagactatcccttgttgtcaatgaatcgactaaaactctaagaggattgtgtaagatggcgaaatatagcaagtaattttgtcctttttctatgatcagaaatgtctcccatgcggtgtaagttactgtataatgaaaaatcaaagaaatccaaaatccattgaaaagaaaagtcttcatctagtaaggcatagaataagcttttaagttctgatccaaaatccagaagcaatgatcattacctgtaagatcaaaagtaaaaccaaaagcatcaccatcttcggtggtctttactccatcaggtttggtaggtgagaacttgttgagaacttgagccatccctttttctccacttgcttaagacaaggttgcaacacaagcccaatcactatagctgcaaggctcaccagcgcaactttcaggttagtaaatgccatgatgacaccgatcagtactgttggaggaatgcacatgaggactgatcccaaaacccctacaggtatcttgaacggtcttgaggcagctggata

SEQ ID NO: 28828 - DNA, 574 bp, Arabidopsis thaliana columbia
cttcggaccggtgaatgagtcttctcttatagtaactcgaattcttgcaactcggaagagaaggcccttggagatggttgttttactctttgcagtaatttattgaaattgtaacaaacgagagaagtaataatgatccttattcgaaaaaaaataaaatgatccttatttgtgcttgacccaaccaataaaaatatatgcaactccatacgaagggaggaaacgcccctatgacggtttgaagacctaaaatattggttgttccatcttgaagttgaagaatccaagcaacactagacgtttaatccttttgtttttaaggaccatcagtataaaatgtgaaaattatggtttgtaaatcacttgaactatctctactctgacaatccactcaagccttagctatgaattagatctcactttttattgactgctaaatcatgtatctccaaagttgttcgatcgatgacttaaaaaaaagaaaaaaagttttagtttccacatataccaaagtatctaaagaatatcttgaattgaactttcgttcgcttacgcgagaacagattatccatat

SEQ ID NO: 28829 - DNA, 468 bp, Arabidopsis thaliana columbia
ttcaattgactcgtcaaaactatgaaaatggatgatgaaaaattaataacattcttaaaaaaaaaaaaaaagtaaaaaaaaaaaaaaaaaactgatgtgaaaaccgacgtatcaaacccaagaaaaccgacggatccatcaaccagtccgccactgcccattcctaaaatggtcctagcaattcatgaagttgagagacttggcttggatcttgtgggttgtggcctattggttacaagattattaatcatctcattaatcatcggtctaatcataggactcgtaatcgtcggcaacatcaaaggatacggattattaataaccggaacgttaacagacggcgtcgtaccaacaaactgtggttgcttccggttttcaacatgatggaccaaatttgttgaagtagctaattttcttctagcacattacaaatgagcatcaaatccactacactctccgcagctgtag

SEQ ID NO: 28830 - DNA, 556 bp, Arabidopsis thaliana columbia
gatgacgtagatttcaatggcggtgcagaccatgatgatcggtggcgagagagagagagagagacaccgatagaagaagtaggtctttggatatttaaaccaaaaactttttttaatctctggcttaggacatgattgtcttccaaatgtttaaggtttgtggttgcgtcagttaaattgtttgatttatgttgtaagaaaataaattataaagaatattaattagaaaatatatatttttcttggcatgcttgaccaaccattatatatttatttaaattaaacaaaattaattaacatatcttgactattaaacgcaaacacactcgaattcataaaaacaatcaaatccctatgttatcagtttatcactagttcagaagtactatcatttatttgttttacatctttgacgaattaaattaataaagtcggtaatttagtagtatcgttaattttttttaccctatatgacgatcaaattaataaaagtcacttgtttagtattatcgtatggcattcaattgactcgtcaaaactatgaaaatggatgatg

SEQ ID NO: 28831 - DNA, 513 bp, Arabidopsis thaliana columbia
tagagagtttttctttttgcacataaccttaaaaataacacaatttatttgatatgtgtgggtaactcatgaataaatttgacacgtgtcatgatcaggtgagttaacaattttgaaaactcaactttgtataataagatatttggcaaagtcaaagccggaaagcaataacccaataattgttatatttaaagaccatgtaaggtttactcgtttcctcttataattgatgaatttggttccattaattttttatgtttagttaaatttttacgttgatcctagtagtaaaaggacgacattgatgcaacaatgcttcaaacgaccgtcaaaaggctatgaacaagtctttggagacatgcagtggaattctaagctcctccaagcagtcttcaaagagtcgtcaaccaagaaacgcattacttagaagaggcattcttcatgatcagtcaggcaaaattaccttttgtgggtcattccctggttgatggtaattgagaaaacgattttggg

SEQ ID NO: 28832 - DNA, 547 bp, Arabidopsis thaliana columbia
tgcatgcccgtacgtcgtgaaaattatttaaatcaatctaaaggtttggtttgtaaaacttctatacaatggggttctccatgacttgttaacactaaacttagacgagaggagtttgtagaatgcggattatacggttggacagagcagttcggatcgggcatgaaaacattgtacataatccaatatatgtgccaaatatctatataaagttgggttttcaaaattgttaactcacatgatcatgacagtgtcaaatttattattgaaatatccacacatatctaatcaaattttataattttttgggttttgtacaaacaaaaaccctctaacttatctattttttgcatctttattctccacctccaacaaattcataattatcctataaagtctaaaataatacgcactgtaatcctttttcgtcattttttgctacgaaattattttgtaaaatattaatatttaatatgttaaatcaaagctttctcgacgataacttatcctctaccttaaaaagttttaaaatttaatctatgtgagt

SEQ ID NO: 28833 - DNA, 894 bp, Arabidopsis thaliana columbia
tattaatcttatgaagactaaaagaatacgtaatatgacccttatatgtatatagtaaatatttttacaatcacatacattagatttttaaaattttgttggtagagttgaagttttcgttgcgaaggcttcaatttaacatattatatatcaatattttacaaacatttatggtagcaaaaattgacgaagaaaggttgcaatgggtattattttagacttcgtaggataatatgcagttgttggaggtggaggataaatatgcaaaaatagatgagttagagagttttttctttgcacataaccctaaaaataacgaaattgatttgatatgtgtggataactcattaataattttgacacgtgtcatgatcaggtgagttaacaattttgaaaactcaactttgtatattaagatatttggcaaattaaagccggaaagcaataacccaagaattgttatatttaaagaccatgtaaggtttactcgattcctcctataattgatgaatttggttccattaattttttttatgtttagttaagttttaacgttgatcctagtagtaaaaggaccacattgatgcaacaatgcttcaaacgaccgtcaaaaggctatgaacgagtctttggaggcatgcagtggaattctaagcttctccaagcagtcttcaaagagtcgtcaaccaagaaacgcattaattagaagaggcattcttcatgatcagtcaggcaaatttaccttttttgggtcattcctggttgatggtaattgagaaaaagattttgggaacctcttctctctagcagaggtttccaaatgaaaacgacgtcgttttctctctagcagacaaccaaaccgtgttaaacgatgtcgctttgtatagcctgatg

SEQ ID NO: 28834 - DNA, 714 bp, Arabidopsis thaliana columbia
tatgacccttatacgtatattgtaaccttttttacactcccatacattagatttttaatatttcgaaggtcgatttgaacttttcgtcgagaaagcttcgattaaacatattaaatatcaatatcttacaaaatattgtcgtagaaaaatgacgaaaaggggttacattgcgtattattttagacttcatcggataattatgcattttttggaggtggagaataaagatgcaaaaatagatgagttagagggttttattttgcacaaaaccctaaaaataacaaaatttgatttgataagggtggatatttcactaataaatttgacacgtgtcatgatcacgtgagttaacaattttgaaagcccaactttatgtagatatttggcacatatattggattatgttcattgttttcatgccagatccgaactgctcttcccaaccgtttaacccgctatccagaaactcttctcctctaagattagtgttaacaagtcatggagaacctcattgtatagaagttttacaaaccaaacctttagattgattcaaataatttcacgaagaaaatattataaatcgatttatttgtttaaatttggagatataaaccgatgattgattaattatgtgaaccattttacttttatttctctttgtagcaatattcttagttaatgtacgtgttcacacatggagttcaactatattaa

SEQ ID NO: 28835 - DNA, 586 bp, Arabidopsis thaliana columbia
caatgaatacatcatcgatcatgccgcttcgtgccccaacggctatgttaacattatccgattccgcgccaagcctatagagataatccttcccttctgaatctttaacttcccatgacgattgctccgacaacttcttccgcggctttgcgccaccatcgtcattagccactttgccgccgtcattagaggagggtttcgagcaaacgattgaagagagttttctggtattgattaaagtagcattgaacgaggaagaagaagaagaagaagattgtaaaggtggaaacttgaaacgcagagatatgtttgcaagcgccattaacccaccaaatcacttcacaattaaagcttctacctttttccctcaatttaataaaaaaagatttatacttttctcccaaagataggattttgaagaagaagagccatttgttctcgtctgatagtggctaattctgtggttcttgaagtcaaaagatagttttggccccacttgttactacttgcatgtttgtatctgtctgaaactatagcaattccaatttgtaagaatggatatcagttttttgtttggtggattttg

SEQ ID NO: 28836 - DNA, 775 bp, Arabidopsis thaliana columbia
ctcgcaaaacaatatcattcagtctccgagacttcactatctgcatcatgtcataaaaaaaaaagctttttaagattcatatcaaattatcatatgacttcataagtgaaaaaaaaaacacaacttaaagaaaatttcacttcttgaaccgaaaatttcactttcttacacggtacatataattcactttcttacacggtacatataattcagagctaagagaaaacttgaaccgaaatcaagaaaaacctaacgaccaaactcaaatcaggtcaagaagtattaactcaaaagatgagagaaaaatgaatttatcttattaaagagagccttctttcgtaagaaattacgtacccgtaatctaacaaataagacaaagcacaaaatcacaagttatgaactctgtttttttctttaacatctaagttatgaacttcatctatgattgtgaatataaaacacatagaaacgaaagtaatttgtatgacaactatgtggaataaactaagggcaattatgtcattgatgaagacgtgaacacaaacttgcttagttttgaaaaaggaaaaatcagctagtaaaagaaaagttgataatcagcaacaaagaaagatcaaatatggatgacaaaaaaaagaaacaaacaaaaagattaccagaagagaatatagaaaacaaaatctttaaaattcgtcgtcttcttcgaaaaaagttgtctgagaatttgattttccttagttttattggtctgagatatgttttagttcttcgcggg

SEQ ID NO: 28837 - DNA, 716 bp, Arabidopsis thaliana columbia
tgatagatgaaagaactgattaaacaaaatgacagaaaaaacaaaaagaaatattatattaatgtgtgtaatcaaatagataattaatgtgagtattaaatattatactcataattgatgtgattgataaattattgatttgacagaaaagtgaagtgagtaacaaacacagaaaacaatataataataaaacatatgagcaacatctcaaatcaacaaagaagagggaccattttgcatcgagcgaacaatcttgataaaggtgcatgtattttgtggagttggctagaggggtggggagattctcttctccaattgcaccatcgctgaagcagctatcattcatcggagcaacaccctggccttgacatctctccaccacaacgcccaagaaaggattatttgcctcttgttggtctccttttccctaggcgcaaaaagtatagatgctgtaaagacatgtttcaagagctctcaagacgtcaacagtttccaatctactcaccaatactaggaaaagaatatgctaaaccaatattgcaaaattaatttaatataattaatttttaaagtattgtctatgtaacgcattttaactaaaaataaaaatattatactataaatattttatctgcaccatcatatttcctttcaatattgaaaacatattttcaagcgttcgtgctgcttgatccgtatttgtaccgttaggcatg

SEQ ID NO: 28838 - DNA, 851 bp, Arabidopsis thaliana columbia
gcaacagtcacctcatgtccattccacacaaaggttacagagtgtgttgagtcccatcatgtttgccatcgtccaccatagcgataagatcccatgttgcccaagcaattgcaggtctgtgaaaaaatacatataacttgtctgatgttttcattaaaacagaaaagctatccatggtctgcaggttaatggtcaagacagagataagatggataaaaacctgtcaggtttgcaagcgtgcaatccagtaacgaaactataagcagcatgaagagaggtatcagtcatccagtgcagataagcaatcacacaagcggatgaccggtcaaaaccagtggtacaagttacaaagacacgatggttctttttcagtaaccgtagtaagagcccaacacaaagtggtagcttcttcctaagatcaaaggaatctgcatccctggcaccaaaatatcaaaactgattagagcggtaggaaatgaaagcatgaacgcacataatgtgcctcaaggcgatatgactttgcatactttatagggtagttgatcattaagacttcagatttctggcatgcatcattgatactttgtgaatcgatcccccagttttgagcttcagttccaccttggaaatttagtatggcagtaattccctgtagaaagaaaagtatggccagttaaaaccatactttcaattctatcatttgcataccataggtaggtaatataagtcatataaaagactcacagcttccgacaagttttcacatcctcttctgtttgtatcaagacccacatatatttgctctgtaatctgaaaaaggcacaagagaagatggtgttgagagatgagag

SEQ ID NO: 28839 - DNA, 681 bp, Arabidopsis thaliana
gagtgacccaaacgtaccggtttatcccgatttaaaaaagacatcagggcttatatctagcatttgtgacccattaagaatgaacatcacctagtttacatggttcaactcgaaaaccaaaaattaggtttgattcttttttttttctttcacaaaagctgagattatttctcggaaaatcatcatctcattaatcagcaggtggagtcaacacgattattaaaaagcacatggttttaagacctcaatgacaaccctaatggtggctccttcgtcattgtcagctcctccgtcgttgcatttgttcctccatcgattgcttcgttgccagctcctctgtcgttgcttttgttcctccatcaattggattcgttactactcatctcttcctctttaaccaagttttcttctttaaaggtggcatgggggtcagttgcagttagggttggaagtaggagaacaataagattctgagaaaagagattagggttattggatgttgagaaggagaagagaacgcacggggagagagagagagagagagagagagagagagagagagagagagagagagagagagagagagagagagagagagagagagagagagagagagagagagagagagagagagagagagagagagagagagagagagagagagtgagagagagagtgaga

SEQ ID NO: 28840 - DNA, 390 bp, Arabidopsis thaliana columbia
agattgaaacataaacatcatctacattagcaatgtttaagagacctatcattcggtgagcggttaaattgtcagttagcttgcctactgaaatggtacctgtcaacgtatatttccttagagccttttgtgcttctcttgatagccctgcaatatttcaacatgtatgcactttaaattaaccagtgtcatttaccttaaattctgtttaacaaaacaactggcgatacaagcagtttacctttactgtcagataacacttcctttggagatccctgggatcaacatacccaatggtgagtcagaattagttcctgcaacccaagtctatgcacaggaagtcacatggtacacatacgatacagaatacacgtgcttacctgcgtcaat

SEQ ID NO: 28841 - DNA, 625 bp, Arabidopsis thaliana columbia
actacatttagggctctgatcttcaggttccagtgaaagtatcgccgccacaacatctacatctggttcacgtgccgctgaacggatgaagtggaacgccattctgactaatgacaggaagactggaactgctggaaagatgaagagtttcatccctgagaaggaagtatagtgagcgataaagcagtaagaaacagaaagatggaacaccatatggaagagataaacgcaccttactggaatatctagttcattggccaaatccatggaactgcgtgcccttttaacaactccatcgcttacctggattttggactcagataaggaaacaaggattaagcagtaaaataagagtgtgtgttgcacccacctgcggttcggtcaccagaatctcgccttctgatttgacagcactaccatattccaaccatccatcatggataagcttgaaagcttcatcgcgggaaagaaacgatgcaaaaaagtactgggagagaatgcggttcaaagatcaggacagacgcaccaaccaatatcgagtaaagagggaactagtggtaccttcttccctccagctaaaatctcaatggcattaggaaaaataccagcagtcttggctcgttta

SEQ ID NO: 28842 - DNA, 496 bp, Arabidopsis thaliana columbia
caattacaaggcgccaatgtgtgtttctctgatgttactgagttagatgttcttgagaaatctattgagaatctaggatttggtgttgatgttgttgtttcctgtctcgctagtcgtaatggagggattaaagattcgtggaagattgattatgaagctaccaaaaacagtcttgtagctgggaagaagtttggtgctaagcattttgttttgctctctgcgatttgtgtgcagaagcctttactggagtttcagagagcgaaactgaagttcgaagcagagttgatggatttggctgagcaacaagactctagctttacatacagcattgtgagaccaacggcttttttcaagagcttaggtggtcaagttgagattgtgaaagatgggaaaccttacgtgatgtttggagatggtaagctatgcgcttgtaaacagatcagcgaacaagatttagcagcgtttataccggattgcgtgttggagagacaagatc

SEQ ID NO: 28843 - DNA, 521 bp, Arabidopsis thaliana columbia
aatatatcagtatgaagctaccaagccaatcttgtgtgcatagaattgtttacctaacataggacatggatatactcattaaagaatgttctcaccggtggattctatagaatcataaatggggttaaatgttataccatcaattaggaatgtgacatcggacatagtggggctgttcacgaatttttcacccagaaacaccttcagtataataatcaataacaacaagtcaagacctcaaatcacaaattatttgatgcttgaaagaagaaatggagatttttttacctgttgtgtgggtgaacaaggagctgaatcctctggtgcaaaggatgtagcttttttagctaactcgtataaagcacttgaactatatctctgctgcttattgcttgagaaatagagaagttccaacaaaaactctactcctgcataagtaatacttcaatagatcaggaacaataatccacagaaaattttattagagaatgagattctgaatatatgagatgcttccatcg

SEQ ID NO: 28844 - DNA, 584 bp, Arabidopsis thaliana columbia
tgcaaatgtatgttaaaggagtctatgtcaaagcaatagattcaagtgcaagtcactgtttcagacctagagaggttgctttatcatcaagattcatacccatgagagaactctccaaagagatctaacaaatttggtagctgaaacttagataatcagccgcaaaagactcccttcttcacaataagtgacaacttcggaaatacatgagagttcattatcttttaagaaaaactccgatcttaaagaatgcctaagaatttaagtgatcacacaacatcatcgaaggagagcggtggctgccttctctgtctcaaatttgtgcttcaaatcatgatgcagaacggagaaattaatttcactttcatcaatcgaaaacagagtaggggttcttcatcattttcagtcacatacccttagtcagtcactcagtctccatctcctcgactcatgcctatgaatccttccctgcatttttgcagcagaacaaaagcaaaccttgaagcccaggaaggcatagaaagtggagttattatccaaaaccaaaaatttcccagttacctcaaatagagtggagagtatga

SEQ ID NO: 28845 - DNA, 878 bp, Arabidopsis thaliana columbia
gctgtataatattgcacttggcaatgcaaaggtattctgactcaagtagactaggaataagaataagaatagaatacaactgtttgtattacttcttgcagaaaagttttgtatatagcagactttaaattgatagctgtttgaacactaaatttatctaaaagaaaattgcaatggagaagatacgtaatctttatgtcagatggtgatagggaaagcacatgctgcacccgaaagttgaaagttattcctttttcagaatttgcagataatattcggggttcattttctacttgaaaccgccagttgatgattttcaaagattgctagtttctttattgcataattataatagcattgcttctgtacttctttcgctttcatggcttccatacattggtagtaaccctcatcaggtacttattaatttccattttttaggtctattgtatggttgcacatcctctacaaccacatctcgtcgcaactggtaccaatgttggtattatagttagtgaatttgatcctcgtgctatcccgtctgcagctcctctaccagcactgcctggaagtcgggagaattcagctatatatatccttggaagagaattaaagctcttgaactttcaactatccaacacagccaacccatcccttggcaataatagtgccttgtccgaatcagggctttctaagggagacccaggtgaacagttaactgtaaagcaaaccaaaaagcagatcgtggcaccagttccacatgattcatactcagttctttctgtgagcagttcagggaagtaagttccttagctaattgttttttatgaatataattttcttcttaactcagctaatttgttgagtttttttttttt

SEQ ID NO: 28846 - DNA, 1100 bp, Arabidopsis thaliana columbia
tcaaatattgtttctataaagatctcgataccaagctgaagatcctgccaaagtagaacacataattgcgtaagaaaactcaaaaacaagaaatgtgatttaagtatgcccatcaacactaacctcaatgactccgcgtcttttatcagtagttcggttgggcacgtcatgctctttccctgagatagctttgctaaaacaaggtctagacgaatgttggtaccttcctgggctcagaggctgcattcttgaatttcttctagctaaaagacgtaaaagatataatggtacccatagaaggatccgggcaggtagtaaagcccaccagacaatgaaggttatccagtctgtccaatggctttcgtaattggcaggaagactagcccaagagcggagtgagctttgagacaagggtgatggaggcgtggacatgccatcactatcatcatcaccagaggaatagtccaagctagaagtatcagaatccacagagagttcgtgaatgaagtggttgaaagaagagactccactgcaaaaccacagaaatcaaaagagagtcgaataagctgctataaggtaaccacaaagaagtattagagagttgaagagagttttacttatgcatccagcgtggtaaacgaggtccacgcaatgtaggcctaagctcccatccatgaagaccttcaagaacattggactttccgggcaaaagtgtcaagagaagcgcagaaaatccattaatgcatcttgcaatgttgttcaaagactcataagtcagagttttcactgacctgcactaaaaaccaaaatcattagttagcttaaaactattttagactaacacaaacaatcctaataccaatcaaaaacccacaacgaacaccaaaaacccaaacagacaagcattaaacaaagaaaactatccgcagatacaacgagaatcgctgtaattattacaggacaaagagtcaatatgtatactttcttcaaagagacaacaaaccttcaacaactaactaaaaatggtaaatcagaaatgtatccccaaattagtaaaactatataccactaaatctcaagattaatgtaaatcagaagat

SEQ ID NO: 28847 - DNA, 459 bp, Arabidopsis thaliana columbia
tatatcattatcgattatgcttttgcgtgacctttaattatgaatcacattgagtaaaataaaacattattattatgaatccgatttctctttgatcaattattattcaaattctaccttgtctaaattattattatttacgttagtcatataaaagtaatttgataaacggacagatattaaagccatgaatgatacatatagatcgcattctaaaccgcaccgctacagtactggaacaatatcaaaaattatatagatatatatgtatctatgtatttatgttgatatttgaactgtaccggatttctccaatactgcgaaacgcagtaaccattcgaattaaagcatacagacaattcaaattcggtattgtcatatcattgttatttttgacacgttttatatacaattgatttatgtctgaacaaattgacttttagatgaagataattagga

SEQ ID NO: 28848 - DNA, 482 bp, Arabidopsis thaliana columbia
gaggatctacaattctgaattctcactctcaacatctgtattttttttaatatctaaaagttcaaatctacattttctagaggcgagatccacacataaagattcctcccgacgggcgtcgaacctaatacttccacctctaaaatttatcattggaccaacacatagttggttcaaaatctatattatccacaacattttcaaattcttcgcttagtaaagtagagaagaaataatcgtcatctttatttacaattgatgactgtagtatctgcaattaagcatctcttgactacattattgagatatactccccaatatacacatggctttgtgatgttattatagagaccagtgctctatcatagatgataatccagaggagcatattcgattctaattaggtccattactgtcagattttccagagatatatatcattagcgtttatgcttttgcgtgacctttaattatgaatcaca

SEQ ID NO: 28849 - DNA, 489 bp, Arabidopsis thaliana columbia
gcttcgatggcctccatcatactctttccagtgtcagagcacatgcttgatatcaattctcaatacaaaacataatgcagtaaacaatggttattcttggtagattttgttggtttataaagggatataacattcattggttaaaggagagtcatagtctaaaattaatgaaagtaattgggctgtttcatcttaatcgatgcactttaaagggattatttgacttaaagatagaatatttagactcttgagacatgtattcaaacttatgtcgtcttgcctcttggggaagtgcaaatgtttttgggtttaggtaataggaatcattatggtcattgaatgtcagatttaacttaattcttagcacacactaatcggttaattttcagccttttagggctgggcattcgggtatacaggatgggctcggataaaactcgatcgtgtactggtcttttgggtagaaaaatctaaaatattggttcgggt

SEQ ID NO: 28850 - DNA, 519 bp, Arabidopsis thaliana columbia
atcatttcaccaatttccattgtgttgatgaagtcacgaatctcgagtccgatcatattcggccatccctatgtattaattaaaaataaagatcaggacgtgaaaggattctgaaaaacatggggaaaatcagaaatctcaacaacttttcagtagatgagtcatttaattcatatgttaatactattatcataatagcatttaaaaccatacgatgcttttattgatttgagattagagaatctattacttgccgacaagacagtcaacacttcaaaaagttatatcacccaccattacctgccacttaacactagaagaagaattagttagttaatcaaaaataaaacacgagagattcttgttatatatataaagagaaaaaaaaaagaactttgccgctctataaagaatgtgaacgttgctagagctcaaccaatcaccatcaaaactttctctctcaatgacgaaaagtaaacctggccggtccggtttttccggttacatattgtacaagtt

SEQ ID NO: 28851 - DNA, 756 bp, Arabidopsis thaliana
  unsure (1)..(756): unsure at all n locations
gctagattaatctagggtttaatttggccaaaaaaataaaataggttaagggtaggttttggttagcttggacaaaataggttaagggtaggttttgccgttcgatgtccattgatgaaaaagtaaatcttatattacaccaaaaaaaaatgaataaacaatattaataagtatacaaaatatagaagagtcttttacactaacgaaccgttaagaaaaatagatagagaagatacaacaagagcaatcaagaatgaagaagaaaagagaagagttgcatttgatgccgtgtagaaatagaaataaggaaatggataaggaggttgctgctgcccttgtgactgtccctttggcgacggtggtgacgatggtactgatggtggtgaaccttttccatcgggagatagcggtggaggaggtggtgtggactcgaaatagtaaaaccgtggtggtggtggatggatgacggtaattaacggcggtggtgaaagcgattgtgaaagcggtggtggagagtgtttgtgtggcggaggaggcggtggcgaagaggataacggcaatgagggagacggaggtggtgacatggagggagagggtttagagggcggaggagagcaaatggtgggacacgtggagcattcgctgatgcaaagaggagtgaggacatttgtttgatcggacggtgatgatgcactaccatgaccatgacgaatgcaatgatgatgacgatgnagccatgatgatgantgtgtttga

SEQ ID NO: 28852 - DNA, 1180 bp, Arabidopsis thaliana
tgtgtttccgggtcgggtgaaggatctgctttagtattgagtttgacatttttgttttgttttttttgtaaatattagttatgttctaagaccagatccaacagcgtctctaatgggttcctaaacctacatggtcttaaagaaaaaggccaaaaataaaaaagaaatgaaaaaagaagaaagacgtttctaagcttagaaattaattggattagaaagacccaaacgtggcatattctgattgggttcattttttttggtttcacgattttgtttctttgtctccctcggcgattctgatagcgactgcaatttacggtgtgtctgtagcacctcgtattctgaggaagtaggtcggaaagcctaatccgtagaaatttgcgtatagaagtaagtcgttaagtcccgtgaaagagaaagaggaaaagaagcaagaagaaaagaagaaagaagcggaggacaaagacgagaaggaaggtaattattcctcgaatcactttcaatctggcgattgtacctccaagttaaacaagaaaaagagactcacggtccaagtttttaaggaacatccgtacttctttcgtatcgcaaccatactacgagaaaggtaattgtattctatggctcgcataaggacataggttaagcgaagaaagtcggattataagggaaaggtgtgaaggattcaagagagaaagttgcccgagaagagaagaatcaagaaaagtcttgatctgaatgaggagttagtcgccaaagcaataagaccgaagaagagtttcagatagaaggaaatattcgaaacgaagaaagaagaaagcttgtgtaagaattcgggaaaagaaggtgaatgagaaaggaaatcggacttggtatttataaaattctaactttcaccaagacgtgaaatttcgacgattagtcttgtttcggaaacttgcaactcaagttggctcacttggagcggaagttaatcagaagtggagcccaagttttgttgtcggaagtcatgcaagttacacaacctttcattgctaagcggacgtgccaatttgcgctataaaatgcttgccctcattattccacgagtttttggaaggagaatagagaaattagaaagaaacagagagagctagagagaaagaaggtagagaggactaagacgaggctgagacacgag

SEQ ID NO: 28853 - DNA, 502 bp, Arabidopsis thaliana columbia
tgtctaggttgagatcagatttggtttcaatacttccaagtctttttttttttgccaactaaaatataaggaatgatgataggcacacacatgacacataaaatcataatgaacagtagtatgattagcaatccatatttcttggataacacttcttcacagcttttttgacaggtcactataacacctttttcagttcatttttcattttcaatcctcacccacccaaactctcccttcaaagcaatgtctctcctctctctttctcaattcaaacaaactttattaaacctaaaagaaacatttccaatctctaatgacttagttgatagaatctcatttagttacctagtaataatcttcacactagtaagagaatcctactcttcaccaaactacatctctctctatataacaaaccccaaaacatctcaacatacacacacaacaactacaacaatggctacttcaagaacattcattttctctaatctcttcaggg

SEQ ID NO: 28854 - DNA, 1126 bp, Arabidopsis thaliana columbia
cagcaacggccgccagttgtctgtgtttcatttgttggcagaatggtatttggatatgcgtatcctgcttatgaatgttacaaagcggttgaaaagaataagcctgagatgcaacagcttcgattctggtgccaatactggtttgtgatgtttggctttttcatctgttcttatcttgagtttatgccttgagttttctcttgtaaagtttagctttcttcttgaaacttgttgcaggattttggtggctgctttgacaattttcgaaagagttggcgatgctcttgcttcatggttggtattattgatacaggaatgtacctttcaaatgaattgagatatattatgtagacttactttgtttgtgtcctgttgtcatgaagggttccactatactgtgaggcaaaactggcatttttcatatatctttggttccccaagaccagagtaagtaaactctagtagcagctaaaagagagttagttagtatctgtatatatgtgatccattggagttcgttctatctcactgcactttcctttctttccacagggaactacatacgtgtacgattcattctttcagccatatgttgcaaagcatgaaaatgaaatcgaccgcagcttgattgagctaaggaccaaagctggggatctggcagtgatatactgcagaaaagcagtgagctatggacaaacaagaatcgtagagatcctgcattttgtagctctccagtcaacaccaaaacctaagcctaaggtaatattatgcacctaacaaataccatgaaatgctaatcatggatctttcgcttttcaacttcttacatgctcactagaggatcatttaacaagtttctccttgcacaatagtgatattgtttgatggatttgtcttgattctaattttcattaggaaaagaagcaggcagcagcaccagaagaggaagaacagaaacaaccggatcttaaggcgacgagctaagcagcttcttctaatcctcaagtgcgtctgcaatcgaagaaaccacagcttgtaaccaaagaacctatatcaccaaagcctctttcaccccacgtaagcaacaacaactacaaacagagaccaaggaagcaaaagcaagcgt

SEQ ID NO: 28855 - DNA, 655 bp, Arabidopsis thaliana columbia
ctaaaaaattaatattcaaaatttaaatcgataataaagttatctaaatttagtgatgtacgaacacggaacatcctccacctagtaaatgttgtatcggtcatgcacacaaccgtaacgtaagcacacgaacaaagagtcgtattgaaagtctattaagtttgttatatgttttctattattaaaatccataaggagaataactctttgggctatatgcgcatctttcttcaagacagaagcatctttcgctctcgattctcagcatctaccaaatattcatacttccacttgctcttcatccaacggcttacctttcctcactcaacttgctcttcatccgacggtccagatttcatctatatatcccttctctctctcctttatataaccgactgaatcgttcacctctttgcaaaattatacacacttcaataaagagatcgatgtcgactttggaatctccattagaggcgttggcgtttgaatacgctagcttaggtgttttcgccgtcgtcaacaacgtctggacatggatcgccgtcgtgactgccgctgtcagcttctggaggatcagagtcacaaccataggagtcggagacggccatgcatgtgtcttgatagaagaattaaccggttctaaatctgaaaacga

SEQ ID NO: 28856 - DNA, 558 bp, Arabidopsis thaliana columbia
agttcttcctcaacaggagtaatcaaactttgctccagtgatattttgtagccactaagagcttgtttccacggtgttctccgtccatcacgtttcatgtatcccttctcatcaacaaatcccttgtctcgaaacaacttaaatagtttggccgagacatctgaatcaagacctggaatcctatctgccaagaaatccggagaaatcggcaaatccaagcattcaatctctgcagcatcaataccttccattctaagaccttctaagaactctctaatcttttgttgtctatacacatctttaggcatgtgcacaaacagagtaggcggatactgtttactgatactaatttgatcaaagactccttcagcaatcataagcacaatgctactaaactgcatttctgttgcaagagccgagacaaagtagccaccagatgaagcccctaacgcaacaagcggaagtctttcgagcttatgcttctcgacccacgattttattatacttccgacaatcgttttttcctcccaaatgtccacatgttcagtgctagatcag

SEQ ID NO: 28857 - DNA, 592 bp, Arabidopsis thaliana columbia
tattgcagactagaggattataaagagtttcaatttcaagtcttcacaaactagaacacaaaatgttatggattctgcataaaattagtaagtcaactaaaatggtaggaaggtattatccacacatcgaagccgcctataattccattgactatatattgctcgtcaaagtctcaatccaatagcaaaaaagtaaacctctcataaaaatcgccaccgagatattgattgttagaaaagctattataattgcacaatgataattcagttttgcaatcattaaagttgttgccagaattcatcttattacctaccccactaggccactacttcttcttcttcgtcccaaaaggagacactaatccaaacattgcaatctgtttacactaacttcgcaatcttaggatcatttctaatgaactgttcaacaaaaccctcaaacaattcagcaggaacaaacacataattaggattgatccaagtagtatctaactaactaaaaaaaatgctgaatttgatcacaaagattgaatttttaaatccctaaatgtgtcaagtacagaagatgacaaactcacgggaagctttcgag

SEQ ID NO: 28858 - DNA, 845 bp, Arabidopsis thaliana columbia
atttgtacgcattacaaaatattcatttatcttacgaagaatatcataattcgacttttgactcttccactgccacggactagtcctaatataagttttataataacgtatataagaagaaagatacttccacatgcttgtttccaacacacctcatgtaatcgtttaaagtccaaatcacaaatgtctatcaaggttctaatataatatttattcaaatacaatcaaattctatcaagatatatgataaatcgacctaattttaggtgtttggatgatattaaaagaacaacatatacatagtgtaaagggaaccaaagaaggtgcatgaagtttcttaccttttgaaggtgttaccctttaaccaatccattctattttccaatccatatgaaatatttaatgggccaaattttccggcctgtttaaggtgagtggtattaaaaatgtttcgtttacgtagtaacgtagcttatttccaacaaaaagaaaaattgcgtccatgcatcattaatgggctacaattttgggccctatggcgtaatttatgtaataccttcaagaacacgtcacactcacttagagacacgtcaacagcagacaaacacttcacctaacaaaagtatctctcgatagcttccctaaaccctttttacgcctctaattctttggattattatccacgtaatccacttcaaactatcaaattattacatcctctaaaatccatctcacaatagctttacaataaagtttcgttgaaaaaagctaacacgaaattgccaaagtgactagaagctttgaatttacaggcacgattaaattgaatattttgacgttgagag

SEQ ID NO: 28859 - DNA, 1399 bp, Arabidopsis thaliana columbia
atatattgtcttccataactgtatcgaaatgacacaaaactcttgacaaaatattaaggttttgaatataatcaacacccggatttaaactctagatagagacattcttgagataattaaagagtgttcttcgaaaatataaaatcatttggttttctggttacgtttcaaaagcggtagtagctaggcaattgcagtagcatccgtgataaagatcgactatatggttgcttctacgtattgaaagcaataatggaggatttggattttccgatttgcatattgaaaatgaatctccagtgttgtgaagacttcccttcacgggtcaagaagcttttgcgccaagtaaaaggagtttacgccataaccatagacccggtgaagggtctgattttggtctgtggcacagcagaaccttcggtgcttatcaaagccgtcgcaaaattggggcaaagtccccaactttacgcctacgagaaggatccagctacagcaaagacccgattccgcaccttgcttaaacgttatgccaccaacaagacacaagataaaccatccccgcctgcaccacctgtcacggcaaccacccccgtggaaacttgtccagcaggaggtgaaacatttagaggttttgggtatcctggaccaacgacgatgatgcagatgcccgccttttcgttgcccccaccgagaggactgccgggatggttagcaccaccgacaaacccgaggttgaagtacgaggagccaaaggtgacgccgaggaagccgcctgcgccttatcctttcgattactacgaaaacttggggtttccaccatccgactctcttttcaactatttcagcgatgataaccctcaaccttgctccatcatgtgactagggcttcttcctcaatttgactctgtttttcttagtttcgtgtgaggaggatgccttttttgttccaatcctcgtatcgtacgatccaacttttttcctcatggaaacttcacactatctcaatgaagtcttacagttgattttggtgaattttcatattaacaactatacttggtagacattatattgtttgggccatggccaaatgtataaattttagtgcttaagactcttagtcacggaagggaaaagacttgacggtgaatatctgcccgattgcttctagcgcagagacattccagctctcgacatgcctcacaatcttgtaccaaaaaccagtgcctggatcagtcttatggttttaacacacgaaaataatcttatgaccgaaagagtggaaggtttcagtctttttcttactttgaagtctttatccagatcataaaccgtattcccgttgatcgatatcaatggtctccatggcagcttcaggtaagttctgaacattgatcaagaa

SEQ ID NO: 28860 - DNA, 672 bp, Arabidopsis thaliana columbia
tgaaaatagcataattaaaataaaaatgacttctcacaaagtattttggaatattttactccttatttaactgttatgagacatgtttgattattttcttctatatggacttctaatttataaaaaaaaatgcattaaaaaaggttgtaagtgaaaagttttaaattagtcttggcaattttgggtcaagtcgagaacacaatgtatgtgttattatatctctaccaattcgctggtagtggaattcacactacccacaaaaatgccatacatctatagtctgatcatttatagaccttcttaaaattgggcttatatatatggtgaaaaaggtgccgcaatattaaaccggttctaaaaattttattaattttaaaagatatgagtgttttaattattgttaaacatttttacacattattcttatgattcattttaacaagaaatattaattcttattgaagctacggcttaggaagaccaaaactcgtcgttggacaaaactacggtttagcaaaggctttcatgggcacataataagtttaaaggaaagaatgaatattaatagagaattcgaccaaaagaaaacatccattttagattcgttactaaagatcaaagatgatataatacaaccgaaactatatgctataactactacccaaaaaaaag

SEQ ID NO: 28861 - DNA, 1591 bp, Arabidopsis thaliana columbia
acccctcctgccttgccctcctcccacttggtctccttatcccaatgcattttcagttgttgttcttttgaggctagtttcattgggtcactttgtgtttgaccttcctcttgctgcggggctgcgtcctcttgtttccggcctcggccttgtttgtttctgtttcaggtttgcgtaccccttctcggcatttatcatatatgttatgtttttctagtaaaaatttaaaccaaaaaataaaaaaaatttcagattagcgattaacagatgataaacggtgtcatagtgtattgattatcaaaacaaattgcaagtgattcatactacgaacaaccgtttgattttattttggtgtgtgtttgtttagagaagaagaaaagacaaggtttcttctagaattatctattcaggtaaataaacatttatcttttcaataaaatacaaaaatcaatcaatatgtgaaatgatctgaagaaagttttgtgggtttcggcccaaaacaaaattgtcatgttattcattaatggactcctaaattattcgttgaagcaaacaatttttggcattttattagatattcgataaataatcataaataatagacttatttgtctaaaaaaccacaaaaacaaataaaaattgtatgacttttttgtgttgtcgtcgtcgtcgttatcaaccctcatcatcatcatcaccaacgtaaccaccgacgccatcatcatcgccattaacaactggatctgtctccgtttccatcaaatctctttctctctctgcagatcaattgattttttacaacgtgattgaagcggggctagctccggtgacgatagttgattggttttgtcccttaagatgagctccttcaatggtaacgaacggcgtcggcggccgtgaatcatgagagagatggctcagtttctttttcttttctctgatcttcctctttatcatcagattctatctcagaaacttatcaatgtgcgtttgattttttttgcttgggttccctttacaataatcattagggtttagtttttgaatggaattctcttccaataaacaaaatatcattaatggtgaatagtgaggacgcaaatgattattgaaaagctttgatttcgaatactcgattgcagatctgccacaaatctgaaactctgtttttactattcaccttcttcttcatttgcaagatgatttcatttcgttcgtttaattttttgctttggtttcatcaatactatcatctttagggtttaattattgtgaatcaatgaatgtttttagttagaatagattttaagaatatgagatttggaaaaaaaattggatttaaaagaagaggagcgtgcaagaagatgatgagagaagatgatgagattattcaggggtaaaatgatcaaatcgccctatcaaaactactctttttcaaagatcatacacaaaagcctcaaaatcaaaatttttatcaaaaaacatcctcttttgacaatacccctaaataatattataagtattatcactaatattctgcaactgtccagattatttatcatttccaaagaaatatattaaaaattatatt

SEQ ID NO: 28862 - DNA, 506 bp, Arabidopsis thaliana columbia
  unsure (1)..(506): unsure at all n locations
gaggatccccgtcctggtcattttcaaatattttttcgtttcttgctttccaaatataccaaattatccatggatatgaagattaatcaaattctgaaggtaggatgtttttattttttgtgcacaattttatatcatagtcaatcatcctcaaaagagagaacaattacagatagggctacataaggaggagccgaagcaaacaatccatgcatcaaaagcaaagcaataaataaagataagcagattaaaggatagatcaaagtagttttaatctttaggccatacatgtcgttgcaacgtccatggaccatgataacattaaagcaaacaagagagaaggcaccttggacaacacaaaacacaccaaatgcaatgttgcgcgagattgattgtgccactagggcagataaaccaatccaaagaaaggctatcgagatagaggtgacaaangcaccaactgacgagccgttgaaattcaaaccacaaacgtggttctagattgg

SEQ ID NO: 28863 - DNA, 363 bp, Arabidopsis thaliana columbia
ttcttacttcaaattgctggggaaaacaattattctctacgtatgggtcctaaaagaattcaaatgaaaactttcgtctaaatattgtaccaatcacacattaaattttcgaaataaattccacagttaaagtttcccacaataatcttttttttttgggcaaaacattacttaataatcaaaatacataattaagttaaaaagagaccctttaaccattacaaccattattaataaacaacattagtttttgtctttcgaaatgaagaaaacacaaattcaaacaactgaacacttagactagaaaatctcggcctttgggaataaaggttggtggtggtggaaggatcttaaacatggggg

SEQ ID NO: 28864 - DNA, 694 bp, Arabidopsis thaliana columbia
attgacatgctagaaaaaaattaatgtagccgatttcgtcaacatcttataactccatctttgaaatcatgtacagtaaattattttcatatacgactactacatgaactacatagtagtaaaaaaaaaaaaaaatgaactacatagtaaaaccatttgagctttctttataaaccaaacctaaatttaattctcaatattcaaatcatcaaacgacgttttgtgcattaaatttttcgacataattaaagcaacacggtgttttaataaactcaatgcaaaatccagctaattttcattaaacaacaaatactcctttgcttatgacaaaagcgcgtaaaggcttacggtgaaatttggaaagtagctaatttgacttaattcggttatggaaacaaattaattttatttccttaaaaacaaacaattaaaagtttcaatttctttgaccgttgatttaacgtagcattgaagcattttctcagagagtagagaagacgctgcgaaactcagaaaattaaattttcaagctcggaaggaaactctgattcattattacagattcgaagtttcagagaagaagggacaagacaaagtttaactgcttacttgttgtgttgttgcgctctgggtcttaattgctgaagttttataacggagatgtttcagttatgatcttacagatctgaggtta

SEQ ID NO: 28865 - DNA, 915 bp, Arabidopsis thaliana columbia
gtgttctcctgtttctttgaattgtgacattcgttgttcttgtaaaattggtctgctagtttgaatgagtcaaagactgggatgctagtcttagtcacgccgctaaaccaaatcatccacacctgttgtggttaagtttgataaattatcatcgattttagtgtaatggatttgaggaagtttcttgctcttgttggctttgtgcatgttaccgtttgaggaatgttttggcttgctttggttttgttaacatgtctaaatctttgtgtgttcttgttggattgacagtaccattcttgatggtggacgtggcagagatcacttctctaattcaagtggagatcatcaggtaaagatgattttcttagccatgcagtgtttgcataaattcattttataacttgcaacttctattacaggtgaaagaagatctggaagcgctgattaagatgcgtgaggcgcttcgagatgaggtatgaggtagtttatctgtgcatataggctgttggtagatttattttacataatcacgagtgatccaatgaatttatgggctactttcatttttaaggtgatggtgatggaagagagactggaagtaaaagaagtagtgtgctcagagctacagaagaaatctaaggtatgtgtcttctatatcttacaaccccaaaatgtttgactacagatttgttctcatttgaaatggttaagacagagattagaagatttgttgatcaatgaaaagaaactggtttcacaacgccgaaaagaattggcaaaggtaagcataggttcgattcctgttctaaaagtcggttttgttaggtaatgtttgttgacatttggtctatgtttgtggtagctcataaatcatattcaagggttagagagtgcacggcaacctgaaagactgtg

SEQ ID NO: 28866 - DNA, 632 bp, Arabidopsis thaliana columbia
ccccaatagagatgtttatttttccatcccattttttaaattacatataaataaatatataagaaaggaatgagctaggcttgattcacaactttcgtctttttttgttataaaagaaagaaatacaaagtcgtataaaaaaaagagagagcgaaacaggaggaagcagcaacacggaaaaggtggaggagaaaaagagagtacttgttgtggtataaagaatgaaggagtgagtttgtgtgtgagttttataaaaataaaaaagcaggagcatatcacacaaacaaacaacgtagaaagggttcgaatgacgagtaatggagaagggggagaggtggtggcgaagaggaggaggaagggaattaaggagctagtgcaggtggctctcaggggaggttgtttggctgcttcagccacggccatggcggtgatgctgaccgctactgaggagggagtggcagacatctacggcttcaagctcactctctcctccaactggtctttctctccctcctaccagtcagtcttcttcttcttcgtcttcttcttcttacgagcattataattagggacagacatagcaattagaattttctttttatctgaatgcatatatatatattataataaaa

SEQ ID NO: 28867 - DNA, 562 bp, Arabidopsis thaliana columbia
cggtgagaatggggacggaggtgaagtcgattagggttccaagaagggtctggtttggatcacaaatatctatagttctcctcgtgggtggaaaccatacctcctccaggttttgtactcgctagattcttcgattttctctttgcgattcttctttgttcttaagatctgtttagcaaatcgtactagacattaatcatattttaagattccatcggagctgaagtatttgaagaaatcaatgggtataaagatcttgaagcttaatatcttccgtggatctacgaataggcatgctctgtttcgtgctctcatcatcgcctctgctctatctgttgtccctttgttggagttaaccgctaaaaatcacgtctttggtgatcatggagcagtggatttggtcgatctcggccgatttgttattccaggaccgaaattgttcttccataagctcgttcaaccattctggggtaaaattgagacagagaagtatcccaagtggtaattgctgatctcgttgatgagctcatggggttaaagctattgcattatgatgctaaga

SEQ ID NO: 28868 - DNA, 984 bp, Arabidopsis thaliana columbia
acactaacatcagagatcccttgtcgattcatcgcaagaacagctgaaaccgatctccgaccaatacagagagcttttgaatcattactcagcagattcataccagtaagctctctgacaacttgagtagtcaaataaatgttgtccttacatttgtcagattccaaatagttccaaacaggtttcaagaatctattggagaacaacaatccgttacctgagaaaagaaacggacctagaaacgcgaaattcacggcgcattcatcaaccttacacggctgagtattattaatagtctctccttcgtaagctccggcgaggtttcgcaaaacagatacaacagagaaagcgcagacgatcacgagggcgcgtaagatgacgcgccgacggaatgaactaggcatcaatttcagcttcaacacctcaaagcccatagtagttaaaacaagaactgaagagtttgatttcaagagaagatttctaggcagaagaagaagagagatttagcgagtgcaaaacctggaggaggtatggttgccacccacgaggagaactattgaattttgtacacctaaccagacccttctcgattcacgtctctgtatcatcaaaagatccatttttttgttgtctacccaattgatcgaaccattcgtattttccttgagatctagctacatactaagacgacgaactctcttcttctcaacaaagattgacactttaagctgattttggggattagggtttcgtaaggtaaaggtggaatctgggtagagagttgggagcagaaggaacgagagatctgtgatcttgagagaagctcaagtgaagtaataataaagtgacaactgcgaagggacgaggaacggaggaagagagttagagaagtgatgacgtcatcatgacacgtggttagttccgaagcctgcgttgagtaataacaagtttgatatgataagatacggtaaagtgtttttttac

SEQ ID NO: 28869 - DNA, 572 bp, Arabidopsis thaliana columbia
  unsure (1)..(572): unsure at all n locations
gatttcttaagggctcagctgaatctagttttcaatgtctgcagaacaaaatgaaaatgaaaattttattatctcaaaatccattctattttttttttgtgtgacattaatcaatgatttcaaaataaccaaaaacatacaaattttatgtttcattcttattattatcaatttatcatcctcatcctccctcagctcctgaaaactatgtcgttttggaaaatgacgaaaatacccttgtatctgtattgctatgtaaactactgttgtttcaacaaacataaaattttgaaaaagtaataataagaataaaataatttatttcataatctaaaaaaaaacgaataatctaatagattgaaggaggacttaataattagaacaaggttatataattagatatattctttttttttttaaggttatataattagatatattcgtttttttaaaaggttatagaataagatttcattgcatcttaaaaccagacaactttcagaactgaagaatgacganaaattaataatagaggaggagaggaggagctacatcaacattatttctatttt

SEQ ID NO: 28870 - DNA, 471 bp, Arabidopsis thaliana columbia
  unsure (1)..(471): unsure at all n locations
ttaccaattacccctacagaaatcgacgacacgcgctcaacgcgaggttggtgcgagtgggcatggaatggagcgcgtggcgangtgttggtgcgagtgggcgaagtccagagtgcgctgattggctgaaaaaatagaaatagtgttgatgtagctcctcctctcctcctctattattaattcttcgtcattcttcagttctgaaagttgggtggttttaagatgcaattgagttttattctgaggtttttagttattttgaaatcattgattaatgtcaccaaaaaaaaaatagaatggattttgagatactaaaaatttcattttcattttgttctacaaacattgaaaactagattcagctgagcccctgaagaaatcaaagtgagttgaatatttttctaaaaatgtgaaaactggtaaaagtttgtcctcattttgctagaaaaaggattcactttaaagttaaaa

SEQ ID NO: 28871 - DNA, 611 bp, Arabidopsis thaliana columbia
gggcattctatttaacattttaatattatctttcaggaaaatttaaaacatttgactaaatcttattgatgtttgcgtctatttacaattttaatattattgttttagtacttcaaagccttttccatctttcaatatagaagacccacggatctcgcggtcaacggcaaccataaggtccatccgtaacacattaagattctatgaaataaatcgatacttgtattttcttaacagttacatgaaaaatgaattctaacaacgatttttgtttagtataattttgtcataatcaaacatttgtctaagtttaattcagattttgttattcatcattcaataccaccataaacccgaaatacgaaactacgattgattcatgggattatcatacaatagtaaagaaagacaaaatctgattattaagagaaaagaaaggcttatgcgataattaaaaggctgaaacttatattaaaaccaaagacaaaaaaaagcgatattaattagaagaggcgttcccatggtgatctttgctaacattgtcgtcattgttgctacggttagccgcgagagctgcaggagacggcggagggatctggtgacgtggcggg

SEQ ID NO: 28872 - DNA, 533 bp, Arabidopsis thaliana columbia
cacctcattctcaaaaacccatcgcgtgtcgtattttttttggttttcttctctaaaccaaattaaaccgaaccgagatcaatttgaatttcaaaaccaatgtaaacccatcgctgtgaaaacaaaaagctcggccactgtaacaacaaaaatggagacgacacaacttggaagagaaatcaactcgaaatagccaagagaatgttcgaaaaccccctcaaatccgatgcttcctttgattccaacctccaaaagcccatctgctcaaatcttcatttcgaggacgaggactcgaggagtattacaaggtacctctatagaatcaatggcttccatggattttgaaactctttacttctaataaacaccattgtaatgtcttgttgtgaaattgtgtaaggaacaaaggatagtgaaagctgaagagtgggcagagtttatggagtttcagagtttttttgactaagtggcctctgtttttgattcttcagtggtcaattttgtgatgggatttgattgaaattggagaatgg

SEQ ID NO: 28873 - DNA, 383 bp, Arabidopsis thaliana columbia
ctatgttttgagcattgagggtataaaccaattgttatgctattttttaaaaatattgtataatgttatagtatactcgataactatgtcataaaagtggcaaaaacttttctagtgaagaaaacatatcaactcactttgatttctttaggggctcagctaaatctagttttaatggttgcagaacaaaatgaaaataaaaattttagtatctcaaaatctagtttctattttttttttgtgacagtaatcaatgatttcaaaataaccaaaaacctcgtaataagattcaattgaatcttaaaactacacaactttcagaactaaagaatgacgaaaaacgatataatagaggagaagtggaggagctactacacaactat

SEQ ID NO: 28874 - DNA, 433 bp, Arabidopsis thaliana columbia
atccacgcaactcactctcaaaaatccatcgcgtgtcttatttaccacggttttcttctctaaaccaaattaaaccgaaccgagatcaatttgaatttcaaaaccaatgtaaacccatcaaacccatcgctgtgaaaacaaaaagctcggccactgtaaccacaaaaatggagacgacacagaggtacaacttggaagagaacttaacggtcaagtactcgattctactagagtggaaagccaatttctattacaaaatacaaattaagtgtttagcttcggaattgtggtgaatgaattcgagatgggtgattcagaaactgacctctcaccttccttcttgcttatctaccgttttgtccccttcgaaaatcctaatccggcagagcgcaaattaccaagtctcgacctttctcctcaaccatgtcgatat

SEQ ID NO: 28875 - DNA, 831 bp, Arabidopsis thaliana columbia
cgaagtcttctgatccgcagtgagacgtttagtagacaattcctttaaggttcgaaaaagaatcagaaagattctgtgagaagccagaacgtcagctgagtgaagctgttgcgctagtaccgaaaagagatcaggcctgatatcatgaagcacgcaatgcataaactcagtaaatcaaggaagatagtgtccagttaatatgaattaagaagggaaaatgctgaccattccctaggataatcaaaacgggctatcttcgatatgagaacagccaacatttccgctatctgcaataagcaaacaaagtcagatagatatgcttacaaagtatatgcctcaaatggtgtagtcaaggaaaaaaatcaaaagtaaatgctacaacacctggtagttctcttctctcaagtgagacaacaatttctgcctcagatgactcttttcctcgttgctcatactcctgtaagaattgccagaaagagtgtcaaggcctaacatacagggtagtatctttgcagagcgaagaatctaaacgagccagctaaaaagaattataagtagaattgccgattccggaaacaacttgaacttaccatgaatttcttctgctcttccaatgacggttgatactgttcttgaaatacactgaggccattaatctaacgtccacatgggacaccaaatccttggatgcaattacttcctgcaaccaaaccagaggaaatgagcgagtaaaatcaagctgacatttgcagaaaccacaagacacatagattagaaacgctaccataaggcaagaacagaaaccaggtctactctccgacagagatagag

SEQ ID NO: 28876 - DNA, 819 bp, Arabidopsis thaliana columbia
caagaatatccgtcttaatagcatattgattgatgttgtgatacatatatacatatattgtttggatatgtattggttaatgtctggttagaatcacattacaaaaatttaatatgaatgattctagttaatttccgcagaagaacgtattaaaaatgttccataaaattgttcaacgtgacgaccacgctgtcttaattctaacaattgacttcgaaacttcaaattcatacaaacgtcgcacgtgtgcatttttttagtttttggttttaaaagttgaaatttctacatgaagttaattaatgatccttgggagcagaattggatctcctaaatcattaaatcgcattcgtcagtatcaacgtcaataaaatgtagaaactaatactactaaatagctttcctccgtctctgaattggttgatatctaaagttaacgacgtaagggtacatattattcaaacatacattatccacaacattttaggaattttaaagttatttaactattaggagtaaaatgtagtagctaactgaatttttctctcatatataaaaaatttcataaaaccccttcttaagagaattaaagaaactcaatggctaaatgtagcctaatatcaccgtaatagacatgcaagtctagaaaaaagcgtatttggaacagatcaatgtgattatcttctaattatatgtactcgttccccaaatctcgtttgttaaatcagaaccgttgagataaagacacgtggcgagatcttctgtgagaagacacgaccgacagaaatccacgtggaccacgtaacttagacctatacg

SEQ ID NO: 28877 - DNA, 891 bp, Arabidopsis thaliana columbia
cttttttgttttttagtttatgtattcaagcattttctctttttcaagctctcaaatttccaactctttatatgcaacgtttacgtataacatcttagttaagatattggtgagtaagattttggaatcgttttttatactatagttttaccaaaatgcatgagtcgtggaagcgaatctagacccacagttttgttttcaattgcatattccttcttataagcattggtttcttatatatttattccaaatttaaagtgctgttctaaaagttttggatactatattctgtaaaccaaaaactaaaaaaataaataaataaaagaatttgtacacatactctaagcctcaaataaaacaactgtagtttaccaaattttgcatccactaatgtaactagactttgatttataatatttttgaacaaagaccaagagagatcttgaacgtggaacaaaagctcaaaatctttcacaaaaaggtgtcttattccacaagtgaactaatggaacagattcttgcaatatcttcattttatttatataatcgacctttaaacatcttggaatatatctacgttattagacactaatctgattgattaaattaactaaagaataaggatcttgtcatatccctctgcttaactctttaatcttgtctatactttttgttcaggaatcttcacggcggttctcgccctcttcaccgacctaaacgtcctcctaaacctagtctccatcggaacgctcttcgtcttctatatggtcgcaaacgctgttatatttcgccgttacgtaacggtcggatacacggagccatggccaacactctccttcctctgcctattctccataacctcaattttgtttaccttggtctggcaacttg

SEQ ID NO: 28878 - DNA, 564 bp, Arabidopsis thaliana columbia
tgtaagaatattgttcttctcgaatttcatcagttgttgcttctagaaattttagattttttgggtggcagccatttctatatttcgatggataagtcaaacgttcataaagtcaagggttctgccttttgtttgtgtttcatgattttaccttgaatttcattaactaaaacagtgttaatagtaacagttggggtggtggcgcagttggctagcgcgtaggtctcatagctactgagtgatcctgaggtcgagagttcgagcctctctcaccccaattattttttcaatatttttaagttgattcgggtcaactataacgggtcgggtaatgatccaagtacatctaatagcaaaaccctaatttggcgccgatatgtccatcttccttctccataaacccttttcttttaacctactcagtttttctgtttgcgtcgctctcatcccagggcgagaaagatggtgaaacggagtaaaagtaagatacatccttcaatcatattgatattctggatctgtcttattgaatgaatttgaatcatatcattcagttcaggattc

SEQ ID NO: 28879 - DNA, 1293 bp, Arabidopsis thaliana columbia
gatccatggtaataattcagtgaagacaatatgtttttaagggtaagagatatatgctgtaccgttcttcctgtgttgaggagggtctaggttttggacgatgtggccgattatgatgaccttcaatgctatctcttggcttgctgtcctcaggaggggagagtacttccactggtagaggctctgtaggcctaaagtctggagccttttcatatggatgatttgtagagccattggtatcaggaaagctatcaagtgaatcagtgtgactcatatcgcatgaaccatttgtttggttgggataatgaagctgtctctcacgggtgtttctgtcaggaaaattcatttctgagtgcgcttgtgacatgcttcggccattgttacgcggcgacctagcttggtgtgagttccttcctcttggggagaacggtctatccctgtaatggttctgcataaaggagacgttagaagcttggccatttacggagtgtctgtaagagatgttagagaggcaaataagtaattaccgcattggggaagtatgttccagttcctcgtggcttaggtaattcctcgataccaaaaccaggacctggaatcatctgagggttcacatgaaagaaaacctgtctcggaacaactccatttgcatttactggagtgggcgcatttcgtctgaatggcagagcatgccgcattacttcccatgaattgttgttcggcagctgaggcagcccaggaggtgatagtggagacataggaccattttggacataatcaaaccaccagcgaccaaatcgcaaactgttaagctgactctcgtaatcgcctgagaggtcagacagcatattcggagtgccagaaacacaatgacctgagtagtggagatgcatgtcctcctgtggccaaggtactgcacttgcgaatggcaggtcttcataaccaacatgctcattctcattctcattaatatgtatatctttaactcttctggaaccagtatgccaggaattctcttgctgtttccccaccccgtttccatttaaaacttctccatttctcatctgattaaaagaatgatgcttaccattcaaaggagagtcactttccttatcactaaggcacggagatttcattgcatcatcggaaatctctaacttttggatcctcaaagtagccaagtcttttgcgtctcccgaaaatcgttcctctgaaaccgaaggcactgtttcaccaggtgatccacttaaatcaggcccagttgtactcggtatacttactcctgcatccaac

SEQ ID NO: 28880 - DNA, 873 bp, Arabidopsis thaliana columbia
ttggattattcaacttcaaatccatatagaattccttgattttcatatgtatcagaaattttaattatgtatttctagttccagttgacatcaccttcatccatccacgtgataagtaggcgaaatttagtttcacttatatttgtcaacaagctgcaacgtttagttgtacatgatcttaagagatagagttttgtacaattttttctactcttattttcgtgaacattttaatctgaatttcgttggatactaacctatccatcatgctttcaccattgagcaggtccaccgctactttgtttaagacggttaatcgggtagcagtagatcagaagaaatgggcagaagatatagcttggcatccacataagaatgcacttttctccgtgtatactgcagatgatggtcaccctcagatatcagccatatatctgaatgaagctggagaggtaaaagtatatgaatgctgtagcacattctagcgttttaccatattaaatttgcgattggacattcatgagtggagtgtgtgcttaaacttgtagaaagttaacttggtcttcataacctgttagaaagaaaaaaatcaatatagctggaataattgggaatttgattcgacccttgacttatctactagttgtaagatctaacttgatggttatagtcttttatccttggggaagttagttatgtgctcatttctttttggatatctgttcatctgcagagatgtgagtcgcaatttatggaggacaggcctcatagcaaaggtcttacaacagaatcatgtttacgccttgggatgatcttgcttcacacaggtgggagtgaccatgcagtagtgtatggcgggatcagtgtgagaat

SEQ ID NO: 28881 - DNA, 927 bp, Arabidopsis thaliana
ataagaatacatcttaactaaaagaatatgttattgctctcataagaacacaaaaataaaagaatgataacttcttgtcttagattcaggaacgaagccgatcgttagatcattgtatccctaataccatatagagattgatgagagttagaaattggaagaatatcataagaatacatcttagggttaagtacataaaagaatacatcttagggttaagtacatatttatagtggtagactggtagtgtttcctaatctagatgaacacaactctctatgatagaaataacatatattttcgatatcttctagatccttctataaagttatcactacgaaacctagaattatcaaagatcgtattcattatataccatgagaaactatattcaacaagtcgtactgtactcacctcacaattaaagcattgtcaaatttagaattaacgttctagcaattgtaaaagacacatgaaaaaccccacgccattcacgggactctccctaatttattacaaaataaagaacaagaagatacatgaatattacaaagcattaaaacaaaagattacaaacttaggaaagacggttagacggatgataacttatcattgataagggaaggcggagtaagagtagaggccatggcggaggagagccggaggaggtggagaagattgccttaagaagattgtgattgcgttagccagaaccacaaagaactcctttgctttcatcataatttctatgcatagctttattctctttatcaacatctttttctttctctttcgctatttttttttctttctctaccttcaaattcttactccatcatcttcttttgtatttatatgaagtcaaacatgcatgccatgtgaattataaaatatgtataacttaaacaaaaaaaactactgtataac

SEQ ID NO: 28882 - DNA, 365 bp, Arabidopsis thaliana columbia
aaagctataaagttaatattattataatttaattaatatgactattttagtaataaaatccttcaactaaagatgaatcgtgagaaaacctatcaattatttatttagtgaaaaaactctaaacttaaaatttgttaatgtaaatcctcatccatctatattgtcgtgaaaattggacggattacaattaaaataaaatgtaatatttttcacaaattgaaaaataataaatatacacttaaacaataaaaattgttaattaaaacaacaaaatgttcttatttataccgaatctaaattttctaatttatttaagctctaaaatttagaaagtgaaaaatgagatttttataaggtttgtgtgt

SEQ ID NO: 28883 - DNA, 798 bp, Arabidopsis thaliana columbia
tgtcactcattttttttaggctacatacgtttactttggaaaaatctccaacttcagtcttcttacttgtttgacggaagattaatatttttcttccagctagcaagaccgtttcatacacataaaaggtcataatcgagtgattttacgctagtgaatatcctactaagagagagagagaaagaaaatgccaattgtaagttgatggatcatctcagaaaatgtaacacgaaccaaaaacctttttggaaaattactatattattttttttgtagtgaaaattttattattaacaaatgtctaaaatttgcttaataggttctgaccggatcgacgagataaaccgggttacaacccggttgcaatttggatcaaagctaaaaagagatggcttcggttgtgtcatggacgacgatggtgatcggagaggggctttggtggtgttggggccgaagtgtgaggtcgaagaagcttctgtccgtttttaagagaggtttctagatgagtttcttttctgcgatagattgacatatgtatacgaaaatcagccataaatctctaccaatagctcacatacccatgaaacatcacctccattggaaatctatttcaatttcctataaccattataaagaggtccaaagctaaatctcaatgaaagaacttcatccgagtcgatctttgagagacttcagataggttatgaatcatcaattctcttctttgcatttaaatgtgtgtctccattattttacatgagatactcaaaagagcacaaaatcacacagtactatagg

SEQ ID NO: 28884 - DNA, 989 bp, Arabidopsis thaliana columbia
tgtgaaaaaaaaagaagaatatatcgatatttgggttgaacgctaaacacaaaaacacgtagccaataaaatttgagaaatgagaggaaagtgaggttgagatcggtgagaggccacgtctagttggaaaagtgcaagtaaactgatggcgtggctcctcattacacatagatacacatcttccttgtctttttctgattggtcatggccaagtgggtttggcaaaaacacgtacaaattttttttttgtctcaaaatgttaataacaagttagtggctcacaatattcacttgggacttgggagattcgtttttggtatagagagaagtcgcattcaatcttgtttcgcgcgtattggaactttcttaactttcatcatggcagacccatgatgactcttttgatcctttatgtgtcccattcatgtcttcgtgcccaattctcctacgtgcgctgttttttttccagattagaaccggtaaataatagcacaattgtgaagatatgggcatagtctccgtgtcggtatagtctccttttctattgtcctttgtgtgtgagttaattactaaatttgtaacaaggagaagagatacctctaatacttcgagtaactactagagcttgatagtgaaaagatgtgggagacagtacccacccgagacgtaccggatagaggccaggaggcaggaactcggtgatcaaactcttgtgtcaatttctagcctaagcaatctaacgttccacacatatagaaaactcaacaacaattatttagatatgaatgatcagatttgatgtaccaccatgcgatatgctgctctctgacgacaactctggtatatatactgaaagaaaacatacacccacattggtagtgtttgctaatggatttgtactagcagaggataatgaatttatcgcatatattactcacatttgtaggctcaaatacgataaaacctgaccattagtagtgtgaagtgtg

SEQ ID NO: 28885 - DNA, 563 bp, Arabidopsis thaliana columbia
ggtttccattaggaagagtatacagatgctgatactatgtggaatagagtaaatgatgccattgatacaattattagaagagatgagagtacagaaactggtcctcttttgcctccatgtgttgaaggtaattgtcatttttgtttctctctttagctctagtgatccttattgaaactacttagaagttagtgctttgtactgtttattgtttgttgatgtggtttttttttatatggttagctgctcttaatttgggatgtattgctgtaagagcttcaagaagccaacgacatagtagcggaaggacttacctcggtcctaaaattcaggaaccggtttctgcgtcgactaatgagccgtcttaccatcatgaatatcgtcagcaagctcaacaatcatcaaccaaaccaagccagacagttcaagctgcagtccctgttgatgtacttgataacagcaacaagcgtgtagctactcctcgcggttacccgtttcttcatgaatccatgcagatgcatcaaaagccattggcaattagacaaggaactggtcctgcttct

SEQ ID NO: 28886 - DNA, 873 bp, Arabidopsis thaliana columbia
ctctttgcttcttctcttcatcacgttaaaccctagagatttgattatatggagatacaacgagggctttacatgttcatatatttatcaatataattgtgagtactaattcgaaacggataatgtaaatatattataatagaatttttacaataaattaaatttctattacaacaaactaaaatctatcttctttagcaaaaaaaaaaaagacatagaaatcttctcacatggtacgataaattttagctgaggtatcgtttggagtttggacattttttcaaaagtcaaaagtgatctggttcggtccgatttataaaccaaaccgaacaaaataaaccagaacggtttaactaaaatccctaatttcccgtacgatctgaccttcctttagtgatctcataacttagccattctaaaacccattcaccgtctctgtttcgttcgccgtgattcatagtcgtctcgtctcaccgtcaccatcaccgtcttcttcttccattgacaggtttcattatttctgaagattctctattcaagtagtttttaaagttttcctctttgttactctgattggttttttgtccgagattaacatatctatgttcccccgatttatcatcattttcaagcttaaatttctggatatgtctgcaagtgcctgaagctgattgatatctcttatgaaatctctctgctttcttctgattctgtttccttcaactcacagttcaatctttagtatgcatcttttagtaatctcttctatgatttgttgtgggttctctagtgttttctatacgtatttccaaaaattgaaacttgattatgtgtgattccttttaagcaagatcaatgaataaaaaagtttgc

SEQ ID NO: 28887 - DNA, 561 bp, Arabidopsis thaliana
cgctaacacaagcatcaaaacatatacgggaatggaagaggaatagtaagccatcgctgaaccggttgtaccgccttcggtcctcctcctcctcctccttggccgccaccgccttgtccccctccgccaatagtaccgtaagataaggaggagtataaaaataaggatacggaggagaatacatcgtcgaaggtggtggacctggtggttggttgcaacagcctgtcgtcggaacaggagggcagcgagaacgtggcggtgaagactgtgaaggcggtgggggtggtgaatactgtggagacggtggaggagggttaccatatggagagtagcctgtagaggacggtggttgaggcggttggttacatgggtaaggagtgcaaaaaccagcgtttgaatccaaagctgagtttagattgacacagtttaaaagtgatagataaaaggtaataagaggaacagagagagaagcttgaagagacaacatgatgatgacttagagaaaatgatgagtgtttggtctttggttttgagatttataataaaaagagatgaattttt

SEQ ID NO: 28888 - DNA, 583 bp, Arabidopsis thaliana columbia
actattatgcaaaccacgtggtcagagtttggtggatgtacatggatggtcgataattcgaaatgattgaaataaccacatggttagagtttggtggatgtgtgttgacggtcgataattcaaaatgattgtggtttgataatattatccataaaacaagtgttatgttatgtaaaagatgttgatagatgaaacaagttctattggtcatatccacaaaaagttatttacggaaatgtttatatttatttatccacaattacatattaacaaaacataaatacgagtgtatgaccacatcgatctcaataatattttacgttttcagatttagaagcatgctttctattatcatggaccaaaagtgatggttattgattatgtacatataaaacttaggatttagggtttaggctttaaagtcaagggctagggtttatgtcaagggtttagggtttagtatctagggtttagtatctagggtttacattttaggatttaggctttattgtctaagatttagcgtttaatttagatgattttgggttttgggttgataatcatggctgtctacaatgattta

SEQ ID NO: 28889 - DNA, 1083 bp, Arabidopsis thaliana columbia
ccccaaggaaacgttactctaatccccacccataatcctcaaatgcaaaacataaataatcaagaagaagataacataaataatcaagaagaagagtacacagagaaggtagcaagcaacacacaacacaacaagaagataacgtttcttaaagttttaattagggtccggatgcactaccttcctcaacacatagtcaacacccgagttataaccacaaaggcatataaccggaacatcaccttggctacaccgtcgtgtaagcgacaccggcccttgggtagctaacccagtctctccgggtcctttgaactccttgaggtcacttgcatctcgtcaagcacaccccacgaaagtacggaatcacaaggcaaggttagatacatcccacttgaccgtagcatgcttatggagttaacttggatactctccaagctccacatactacgctcttccaatcaacgttatgaaacatgcggttcgttttcaacgcacatgaacatagagttctctctaaatgtctcccgaatactagcgagtagtgtcttgacattgcaaccatccctctcgagcgaatggtggtattctaacataaccactcctatagattaaggtgcttcggtctcaactatcctagctattcgcttaacaacctcaacaaactcaaccataacaaccacaaaactacaagaagggagaatcgagaacatgcaattaagaaaatcaaacatgcaaaacaaaaaccggaactcacaatcaccgatgaaccttcctaactcgaccgatggtttctactcggaagctctctctcggaatatcctaaggctcagcgatctctaactcactcgggttaaaaggctctaacgatcactttctctatcgggttaaggactcgaacgatcactctctctcactcgggttaaggactcgaacgatcactctctctcattcgggttaaaaggctcgaacgatctctctttctctctcggtttgggcagagttttggtacgatggctcttaaggtttaactaagggagggtaaggctctatttatagagtgaggactcgtgtaagagaagtgag

SEQ ID NO: 28890 - DNA, 916 bp, Arabidopsis thaliana columbia
tttcctagttttccgcagctaagtttataagcaagtctttatttgctattggagttcacgcgtaagccacgctcgatctgaggcgtgtaccgggtattttcaatgaccggtcatgtcgtttgacaccatgttttccttttgaattatttgcactagtaacttctttgcccctgttctcacattagaagctccgtttagtatatgattatagtaatcatcatatgtcatacatacgataactcatcataaggttttcacaacgttgatgatcaattagattccacaattcaatattttggaatatccattctctaacaggattagatagtttttactaacgtatagattacatctctataaattaaagaacgtatattgatccttctcacacacgcatgtcttcgactcctctcatacggtactaaccagcagagtcgcgtgcaattcacgcacttagttgagagtggtccttatagcatctttccccatttaaatagaaacccctgagttaaagactcttttagtcaacgcctctctcgcgttcttacaacaaatctatgcgaaccaaaagtcatttacttgtttttgacgtcacacttttcatctactagtatttattttctgtttgacaccaatttttcttctcgcagatttaaatcagacaaaacccgaataatatctcttacagtttcttttcttttattcctttctctggtaattaataacaattggttagaaaaatcattttctctttgcacataagtcaactctctctctctctctcttttacttcttcttctctttgccctctctttggattttcttccattgatgaacaatcaatctcagctttgagttctcccaaatcctctattgactttgcgaatctaagaaaaaactgaaattaataacggga

SEQ ID NO: 28891 - DNA, 657 bp, Arabidopsis thaliana columbia
tagtaacgtccgccagtgtgctctaaaggcgtcttgggacttcgtaacttgctcttagttgtcttcagcctgcgtagagatctgaaagagcgagacgaagggacgactgctgaacgggtcgatgcgtattgtgggttgtttcggggtctgggcgcgagggacgaatggctgcagtcccacggcgcgtgacggtggaaggaggaagcgaaggtcgtgctcttcctcctacgacttacatagcgatcaactgctcataagtcgctatagtcttaagagtatgaatgccgagttgaagcgggaaaagagccatcgcccagtcagagaccttgacgattcgtgatagttggtgaaactactcagaatagaaagtcagtccataaggcccaccagcaatcggggatctctcttattcaaagctttgacggaccctctatagtggaaatgtctcggtgccaacggtatgggtagagaagtagacattgaacagcggtaggcagtacccaaatgaaatagggctccataattcatgactcagacaattctcccactattgacccagttaggaaaaggaacgtggcccgtgacttccaggaacgaggacgatcattgcaaggttggaggtactttacttgactgaatgaatcctggatgaatatg

SEQ ID NO: 28892 - DNA, 846 bp, Arabidopsis thaliana columbia
acgttcatagtgtattttaaatttggaaccaataaaatgggagagaaataacacatgtcaaataaagagatgacatatgtcacaactttagaacatatgttttgtgaaaaacttattttattatataagatatgttggttgtaacaaaaaataaaataaaaaattctacttcacgggttctctcctagtttctttaatgagttatccgaaccaaataaaaacttgattcgaatccggattttattcaatcgaactgaactaatcaaaatttcatcaaaaagtaataaatcttcttaatatatttatatcattgaaacatattaaaagtctataaaataattaggtttttaataaagaaatccagccccaatccaaaagaaaagaccaactaattcctcgccttttgcaatttcgtataattatttcccaatttttgtgtttgttaattaaatctctaaatgttcgctgacttcataaatttggattacgtaaaaaacgactttcattagtaaaaagctgaagaagagtggtgaacatattgtaccacgacccctcttgttctacacatctatcgaaaagcttagagactaacaatattttatgtaagaaagttgtttttttttattctagactttcacatgataacaaaaaatataacatatatctagctagatatttacataatgattccatagtagaatcatatttttgtttgtgtgaaatgattgtaatgttttcctcatcttgaagattcaaatcctttttttcagaagttgtcaaaccacaaccaaatatctttatcttccacctcaaccattgtttaaagaattagctacaaacatttac

SEQ ID NO: 28893 - DNA, 992 bp, Arabidopsis thaliana columbia
cgtcacaagtttttctgtatgtaacctgaagaagattcactgaacctagtaattaataagtactctccattttgtttggtcaacttattcatatactttccataatagtataggaacattaaaactgaattgaaatcaaagaaatctattgatgatttattatcttctacaattgaatgtgttcgagtgtttgaccgtttcataaaaatatataaaagttacaactataagatacaaaaactaaaaatcgaaaacacaagtataaagcccaataagaaactatataaagcccaatattattctttaaaagcacatgtatgctacctacaggcccatttagttttaaccgcgtgttttagttaaggagcatagaaacaaccctagtccttgccacagaggatcacagctaaccaaatattcccttgcacgtaaaatccgacactggtctatttcgtcgtcttcgacctcgagggaatctactgtagctctcacactatccactcttcatcggcagctagatttccgggtcctcagtatcgggtcagatctagatccggatccggagacgctgagaatgaaacacttcagaactgagcgagtccgtgcgactccgaagctcttcacctacgttctcgtcggtttcatcgctctactcggcttgacttgcctctactacggctcttcgttcgctcccggatccagaaagtccgatgagttcgatggatctaataaccgcgttcgcaccggaatcggatccttgaggaatcgagatattgtgcttgcagtgagccgtttcgaagttcctaaaagtgttccggttcgtgaatcgaatcatttgtttcgaattgagtagagatgtctagatttttagtgttcaagttaagatttgtgtagattagctcgttgaatttaggtttctcatgtagtggttgtactcattttgacctgtgcagatatgtgatcgagacactcggagttgaaccaggtttgga

SEQ ID NO: 28894 - DNA, 997 bp, Arabidopsis thaliana
tgaagattaaaactgatgtttgtttttcatgttttaatagatcatctgaatgattatttttaaactcatccagaaaatgaaaaaaatcagactgagtttgatctgttcattctgctgaagatgattcagtcaaaattaaaaaatgtcaataatacccttatctaatttatggaattacaccataaaccacatctcctcttcagcttttcctcgacacaaaacagagaaaatcaaaattttgatctcgtgatcttgtgatctcgccgtcgtcgacgagaatcggtcgccggagatctcgtcggatccatcgccggagtgtaacaggtttgtgttgctctctctctctctctcgcttcctctctctcgctccatgtctctctcgttgtttctctttgtatccttgttgcaatcacttgttcttgggtttgatccaccatggttacattgtttaattgtgggtttgctttactttgctttgtgttgcttttgattcttcgattagctttaatttacggctttgtgttccttatattgctttgtgttgctttgcttgctttgtgttgcttttgattcttcgattagctacagtttacagctttgttttgcttatgttgctttgtgttgctttgctcgctctgtgttgcttttgattctccgattagctttagtttacggctttgttttgcttatgttgctttgtgttgctttgattattctattagctttagttgtgttactttgattataggtcttttgtgtttttgatgcagaaagctaggatccagatttggcttgaaggatttaaggattgaaggaagaatcactgtaagtcatcatcatatattctttcgtttatgaactgtttagtgtgttattgttttaaggagtttaaatggtgatgatatgtaactgttaagtgtctgagtttaaggagttagctaaccttcgttttagcaaagccttcccacttctttagatcctaaatctttagatcatg

SEQ ID NO: 28895 - DNA, 666 bp, Arabidopsis thaliana columbia
gtagttcttgaggtttcgacggtgaataagacagggaacttgactgcagcagcgtagaggtggtcgagtagatgattcttttcacggcagtcgagtatgacgagtggtgctccggtgtgtttgctcttcgcggtcgagtaaattcgttggacgagagagagatggcgatttatgacgaaggagagagattggagtgtcggtggatggatgaaaagagattggtcgagtaaacatactttttgttaggatgagggcaatttcaaaaattgttgtggagattgaatttgtgattctctttccatcttattttcagggagaaaacgagtgtggtccacgctctgttgttttgtctttaagcactgttccctgttaactgggaaaacctcaggaaatcctgaaatcctctacaaatctctgttggtcgagtaaacggtcgagtataaaggatccaaatcatcaaatttactcgactacagatcctcattagcatgtggccagtgtgatcgagtgacatcttggagctccaattgaaaccatgtttatgctggattgcacacagacaatcgatctctacggcatgcggtcgagtgaatctctgagattggatccattacacttaaacattggcggttatctcctgaaaacactagtaaaacgcatcaaaaa

SEQ ID NO: 28896 - DNA, 731 bp, Arabidopsis thaliana columbia
attagcaaaatctaaagctcaaactttaaggaaaacgtataaacaaaacctatttgagcagatcaatcatgtaaagagcaaccaaactgaatcttgtatacttacaatccaaacaggttgatgtctaggatcgagctctgatgctctccttagtaaagcccgggcaagattagcagatgaatgtttgtactccagtaagccaagggactgaaggagaacagggtctctaggatttagcgcatgacctatcttcaggagctttcttccacgctcaacattacctactccagcttcaaacaccccccatacgtgccacgcaaatctattcttggggcttgcctggacagctttctgtgaaaaaataaaatacgctttcatatgtagctcgatcgcttaacaggcagtaagtcattcctgggatgaatatacagcctccactgctttgacctcattgtgaatgacaaatataaaaaaggatgtagcagttagtagttacctcaaaaagctttctagcagctgggtatctttcctgctgtatttccaactgtgcccatgcctgttcataaattgaacatttagtaagaaaagggaagctcattcataactacaagcagccttttagaaactaaattatgtgactgatgaggaaaatacagggggggccagaatgtggttccatgaaaatggcagtagctccagtagcattctctttttacacaattatctaagag

SEQ ID NO: 28897 - DNA, 1005 bp, Arabidopsis thaliana columbia
atttcttaatctaacttatacatgtataatcataaatacctgcacaaatgatgactcgattgcccttcgatcctgcaacaacaaacttgtcactttggctcacagtatacaatgcgagaaccctaagaaactaagctcaagaactgaactttgaatagattaacattcactctacctctgaactgtgagaggaccgagaatggagagtagcaatggagagccatgatacattgatcctgaccagaagaagaaacaagtacaccacgattttaacttgcacaatagtggaatttcaaattctcatatgtagatagacgaatcaatcacaaacctgcgtatggcgacagtgatgactgcttcaaccagtaaccttcagcaactgaaaacattcaaaaacaaacgcagaatcgtaagcggaatcgagattatggaatagagattgtatgagagagcgaggaggatgagagagagagagagaggcggtacggcggcgaaggctggtgtgaggggtggagacctccggacgggaagataggttgatatttgccggggaaaagatcaggaataatcggaaaatcgtagaagccaaagtccaaatccagaacatgtaaggcttctcctcagccattactccgtcgtctttcttctcctccttcattcttcttcttctccggcgagctagtcgtaacagtgaataccacggcgttattaaaccgtgatataagagatttcaaacgaaccaaataatatatttggtaaactaatcggaagaatacttttgttcaatgtatgatttagcctaattaaattagtttgtgtatgaattagccaagcttatcatttgtgtgtgaattagcgaaacttgtcatttctgtatcctaaaatagattgttgggctatgaatgggtacgggcttagggcccgtaactaataaatatgaagggaaaaatgtcgttaaacccccaactttcaaaaaatggccaatcaatatgtcaatttagatgg

SEQ ID NO: 28898 - DNA, 816 bp, Arabidopsis thaliana columbia
ctttgttgccattactcgctgccacacacttgtaagttatgtcatttaatttcatatggtccttcaagctatattttttttttttaaaattaaaaatcgccggaccatttaaagcatgagtacatgtgtaaggtcattctgcgctactaggtctagttgttactcaagttactttggggataaatttcagttaacgtgtactagctagcttggcataatgatttggatacgtgagagatcatacgaggagcagagcccacttttttggcttgcggcacatttatactctaggccggctctggcgagtggcgagccgcgaggagccatctcccgcattagtgtatcgagcgaaattcagagtttattaagcacataaggagataatgtaccatgtgcaaatgatagtctgtgatgggacatgagaaacatacattctaaggagaagatattttaaggcatcactacatttttttaaccaaacatgagtctcaatggcgtgtagtagaaagactagttatgacgcatctaatacatacatatatgaagattttcttttggcaaaggctgtttcttcaagtttgttgaacggttttgttgcgtgatgtgatacagtgattgagaagtaacaaacaaatctatagatttcagaacaggatgataaaagttgataaaacattgaagagggttacaataccatcaaatctaaagaacaaaaccaaaaaaataacataattgttaaatggcgaaataactatatcggtgggacatcaaaaaaattggagttatctcgtgcttgcttgcgggcaaagtaaatcc

SEQ ID NO: 28899 - DNA, 863 bp, Arabidopsis thaliana columbia
  unsure (1)..(863): unsure at all n locations
attaaatttatttgcgttttagctaattggttcgggtaaataaacataacgctaatatatccaacaaaatcattaacgagaaaaagtcgtaccaacaaaagacaatcagtttataatccacaatttagtagtcatcatgtaatatggaactaatataacaactaacaatgaaatacttcaaaagtagagatttgaatggccaaattaagaaaaaaaaaatgaaaattctactaaaaaaatacaaatgtaaattaattattcaaacttgcataattaacagaacaaaaatctaattgttatgccataatgcaagcaaagtttgatcggaatgatgacccaataatatatttcttagtcaacgaaccataaaatacaggatccaattaatgaacggctctcgttcgtcctcaagcttcaaatctgtattttaaaatatcaacggccaggattcataaatccctcggtggcgcgcagagacagtcagtggccattttcggcgacggaagtaggctccgccggctgctgctgcgttatacaatgaatgtttcctccagcaagaacgatctctcttgcattctcgattcccacaaccttcaaaaaaaattcagaagaagaagaagaaaaatcaaaatctgtttttgtttttgatccatgaaatgaaacagagatggttttaataccgagtgatgaggaaatgtatccgagaggacacgaatcgcttctttatcacgtattggatcccgaattgtggagcgattatcctccattggcgatgtagaaatcacatacgatgctgcgagtcttgtcctgcaagtcttggtatagcttcaccatcctgcacaatganatcgatgaaatatttg

SEQ ID NO: 28900 - DNA, 1541 bp, Arabidopsis thaliana columbia
tccgacgataactaattacacgaagctttggtgggttcctaatgttgttgtggctcatcaaaaggaaggaattgaagctattcatttgcctactggtcgaacactttgcaaggttggtcctagtggctgttccttcagatcatgaacaaggttactatttcacgtacctattacttacttagtcagcgtttataaattcttcctgttcgcagctttctctacttgaaggtggacttcacgccgacataaacggagatggtgttctcgatcatgtccaggtacacacatcaaacactactcccgcttttggttcattagccttctcatggatcttcaatttttacgaccataaatattctctatccaccttagactgtcggaggcaatgttggagagagaactgtagtgagcgggtcaatggaagtgttgaagccttgctgggcagtggcaacctcaggcgtacccatccgggaacagctctttaacgtctcgatctgccatcactccccttttaacttcttgcactatggaggagattactcacgacacttcgcccaggcaagagacacctctactctggagatcgcaactcccattctcatccccagagatgatggacacaaacaccgcaaaggcagtcacggagatgtaatcttcttgacaaaccgtggagaggtacttttttcctttctatatatgccgatacaatctcttaatttcttcaactttgaatttcgtttaataatagctcatcactgctccgtatcaggtgacatcatacacgcctgatgtgcacggccacgacgcagtctggcaatggcagcttcagacagaagccacatggtcgaatctcccgtctccatcgggtttaactgaatcagggacggtggtcccaaccctgaaaccattctcgttgcgcattcatgataaccagcctatgatccttgccgggggagatcaagcagcggtcatcatctctccgggaggaagcatattggcttccatcgaattaccgtctcaaccgactcatgcacttatcactgatgacttctcgaacgatggtctaacggatgtgattgtgatgacctcaaatggggtttacgggtttgttcaaaccagacagccaggggctctgttcttcagttcgttggtgggttgtctcttagtagttatggcagttattttcgttactcagcacttaaactccattcaaggtaagcctcgaccatcatctagcttttaatagaaatctcgtagagttttcttcctctctacggaagttaaaccggcaggtccgctttagcagcttcacccacatcggttttggtaaaccggaaatattactgatataccagtgtagattcagtgccttatttcctggtttcagctgtataactttatactttgtagaattcaagtaaaaaatggtagaggcaaatagaggactttatgtttttgtcaattttgatgttttaatggaattatgtgacatttaatttataaaaaaaaaaaaaaaaaatacgttttctagaaatacttcg

SEQ ID NO: 28901 - DNA, 589 bp, Arabidopsis thaliana columbia
gtaagactttttcatcttttgcttttaactaacaatatatagtacatcaatatatatatatatatatatatatatatatatatatatatatatatattgaactcagctcataagaggggaaaaaagaaagaaagatgtaattcgaatttttgaagatcattggtcgttggattattggaaaagataaaatgctgaataacaaacatatcacaaaagagattattagattcttgaatcgatctgatagctaaccacatcagagttatttttttgaatgaaccacactaagttttaatttgctaacgagttcgacatgatcttacttcgccgtgagacgggaatgacactgcgcgttttatcctcggcatcttcttgtcatccggagcaaccacaacggctaaactttggcagctgtttttcaccgtttcttcagttcgtttagtcgtctcggtactctgattctgcaccacacacggttctttgcttggagttgaatccacaatctgatctgagccgcgcctgacgagaatatgaagaccgatcaagatgacaagaggaagacacatcaagaacaatgcatagtagatga

SEQ ID NO: 28902 - DNA, 708 bp, Arabidopsis thaliana columbia
cctgaccactccctttttttctatttatttatccactttaatatatttgtctacatttttctttgaacatgcatgtgctatttaatttacttaccagaggattaattaaccatgaattacataatgcatatactagtctttttttaaaaacgcatatattatagatcgagcttatattctaaacaagcattttgaaaacatttctttcaaaacagacactctaaacaatgtccgtgctgattgtcttggtaagaaggcaagagcacgagattctattttttcccatgtaagttcttctactccgaactagttttctctcgaagaaaaccgacccgtttttagcttaaatggatgaccttattttgccgtaaaaaacaacaacagtaaaagcatataataactccaattttcattgttacggacatttttgcccttaaactatgagctggagttgagaatgaggtgaaaagaatgcgtttatcttctaaaaaatgcatccccatctctgattcaattttaagtttcttttgacattcagagatatatggcttagatagtggatttgcagcttcgacggtagacgtgaagctttgacggtagcacaaagatttggtggtggttcacggctttgacggcgaggggtaacgaacgacgtcaatggtaaacgctataccctagaattagacttgtaaaccaaaccgtcaaata

SEQ ID NO: 28903 - DNA, 885 bp, Arabidopsis thaliana columbia
tagttcaccaaatcatcaaagatagtccaaagatgggattccaaaagagcaagggtccctgtgatttatatatgtactttgcaaaggattagctgtttcttcttttgttatttgatgtttgtattctgtcttataacttttttttattaataatgtcaattataagctaaaaggaagctcacaaataaatgttttcaccaaatcatgggatgtagattatccaaaacaagctagcatggtgcattcactttcattatatcgaattaacaatataagaaatacaagggcctctgtgatatcatatctactttgcaaaatggattcactggttatccttttgttatttgatgtttttctgtcttacaaaaatgtgtagttttcaattcttctaaacattttttaaaataagttggattatacgttttcttaaaagtatatttctagttaataaattattacccttggcattagtcggaaagcattccaaactcgggacagacagtgtggtggtccttcgtggagaagtccactctaaagtacttcggtgcgtttctaccgaggctgaccatttctaaagggtagttaatattttcttatactcgtaatatgtacatgtgaattttctttttatttgatctttgtgagaagcaaaaatcgtcctaccattactaaatttacattttattgtcatttaagtgtcagttttatatagaataaagttttatatagaataaagtttgaatctggtttcatttagattgttgtaattgtgagtaaacaaaagattaaaaagtaatacaaaatattttacctctatttgatggctcaccttattatcattattatttagagactgtaaatctagagactgtactatcttgcttg

SEQ ID NO: 28904 - DNA, 655 bp, Arabidopsis thaliana columbia
  unsure (1)..(655): unsure at all n locations
taattagggagaaaataaaaatctatgaaaaatatgcattttggttaatgatattgtttaccatatttacatgtttcatcgaaatcttcaaattattgtttatctaatcttcgatttgcttttaatcgacgatagtttgaagatttttgttcttctattgatgttctcctccgtctgtcaactttaacgaaacgatgccgcagagactgagaggaggaggaaatattctgcgattcttctacacggcaacgattctggtcagtttctacacgacaatgattctggttagtttatacacggcaacgattccggtcatttcgttaatatctctgtatagtcccacctattatttctccttattgtatatgaaacaaaaagagattccaaaagtagcaaaaaatatgtcgtcatctcctccgaacaaaaccgatccaccaaacaaaattgaaacacaaaaaaataactgccaatacataaatgtgcgataaaaaaacaaaaaaaaatcattaatattttaacacaaagttacgtcaaataaacacaattgttcataagtgcaaataacatttattaaaattgtttagctaagaaagtttgggctcgtaaatacttattatcttatgtatanacgaatttgttctaatgactatatata

SEQ ID NO: 28905 - DNA, 894 bp, Arabidopsis thaliana columbia
atctttcaaacaagtctcaaatacgttgaaaccaattatttgtgacctgaaagttcttgatgtactaaaatggttgtttttcagtaatgtttatctatagaatggattgaactatgtggatttcaaaagtttgtcttgtgacctattccaaaatgtcataaaacagtcgctttgtgcaacttttttgcgacgacagcagaacacagtcgcacgttgcaacgtttgtgtaactgttttgtgactaaattgcgacgattgtgcaacgttttaaaattttgttaaatttattaagtgtttctcgagtaaatattgtgcgaccgaatagggactaactagcatttttatttgtaaaatgtttcataaatgtcacaaaacagtcgctaggtgcaacgtttttgcgacgacaacagaacacaatcgcactttttaaccaattagctacttattaccaacgctcgagttttgaatttcgaaattgttaagttctggtatgtttatatgttttcttatacgttgacactttaatttggacgatattatatataaaaacataaccaaacacttcaaatctgaatattacaaaccaaacattcaaaaaaacctaatctacatgataaggttcatgtgaattcattttcatgattgatcttttcaaaaaagttatcaccataaaaagacaccaatcaataatatacctaacattctttatgaactaacatgataatactaccaaaatgagtaactatagaataagatcccacaatgtggatttcaaaagtaagtcttgtgacctattcgaaaatgtcacaaagcagtcgctttgtgcaacttttttgcgacgacagcagaacaccgtcgcacgttgcaacgtttgtgtaactgttttgtgactaa

SEQ ID NO: 28906 - DNA, 1042 bp, Arabidopsis thaliana columbia
gaggcatgtggatagtctgaaaactcagaaagttgatagggacttgttgaggaagagtcatcggtcgcctcatcggaatggtggtggtggtagtggttgtcctagccgttctcatacgaggcatgcttcttaggacacgattgacttaccaaatgaggagctgagagagaggagtgagttgcagccaaccaagagtgttgttctgaaacctaacctcggggagccacgttatgctgctagaacttgtgcatcgccaagctcttcttccgatgagttcagagcagatcgtaggcttccatgcaccaccactcatggcaggcagaaaagtaatgaagatgtccgcctgtcaagacagaattcaagagattgtggagaaatggccaaaataatgtctaggcaaaggaaggtgagctgtggcaatggtcgtgccatgagttttgagacttcaggatttagaggatatgcaggggatgaaagctcatcagggagtgactccgcaagtgaatcagagctagtgccagtaacttcaggaacaagaaccgccttcaaccgtaggaactaccatcgatctttgccttccaagtcaacaacatcatctgtgagtagggaagctaagaggagactgtcagagagatggaagctgacacacaagtttgagcacgagatagaaattagtagaagtgggacattagctgaaatgcttgccacttcagatagggaggcaaggccagcaagttttaacggactcagtttcgaagatgggattagtaaaagatttgagaacaacattcagtggcctgaactgccagaaccagttggaatcagcagtagggatggttggaaaggatcctgctcaagaagtttttcaaaatccagaaccatcatgaaccaggagagcgctggtggttacaccatagtgttgcctaaggggttgatcaatcgagatgcattagtgcagggggattcttctcatcacggagagtctttcttgtcaagcaaatctagacctggcagtaacaaatctcattcatcatacaatagt

SEQ ID NO: 28907 - DNA, 901 bp, Arabidopsis thaliana columbia
agctcgttgttgtagaaatcattcacaacagaaatggtcacaacgttggatgtttctacagagtgaaatcgcacaacaccattagaacccttaacaccagcgtcgtcaaacaattttctccttatacttgtcggattgttgaggtaactccggttggtgtgttttgttaccatagcagacattttgaagccattagtataaaagacttgtgcatcgcctactatccctttgtctttatccacccgaccggagcagtcctttttaatcagtgtgttctggttgtcatcaacaatggggtcaagggacagaaataaattcagattcatcgttgtatacttcacatccaaaaattgccttacactcatattgctggtaacaatcacatgcgattttgctgtaacgccccgaccgcccctaccagtgggtctcacgtcctctttcgcgtccatgggtcatcccctatccgacggttggtatgcaacgttcgggaggctttaaagacttgttatcgatctacaaatcaaattaaatttgggttttactttaacaaaagagatgtctagactctctatgtaataaccaaaactatgtaggcaaaattgcaattgtagaaaatatttttgcaatgctttaaaaccctaaaaacctaaattgaacaacggactctcgttcggccgtttcatcaacaactctctcctgtaaacgaaacaaagaaatggctggacaaaagcaagagcttcccgtctccggcgaacctttagccgtcgagagtccgatgaccaacaagaagaagaagaaaagcaagaagaacaaacatacagaggaaaatcatgaagtcgaagaagtgcctcaagaggtcactaatggtgtagaggaagagttgagtaataaagagaagaag

SEQ ID NO: 28908 - DNA, 595 bp, Arabidopsis thaliana columbia
  unsure (1)..(595): unsure at all n locations
taaattaatgtttttattagtagattttaggataattaatcactgttgtagtggttagaatgtcccacatctaaagtatttatgatatgatacctcaaattacatacttttttttggatagagagtatgcgttgctattatacatgcgtttgacgtttataaaaagaactatttgtatagcccactagtccatccagttctctagcaaaagccaagcacattcggaatcagatcaatgagtttgttataagaaaaaaaaaaagtagactaaatttgtttggaaagagtcatctactgcaatcgaatgtgtaaagccactgggcttttattgcccatacaatacccaacaagatccatccttctcaggctaatttgatttttgtttggaaatggataatatacagcccaattttccgattaattaaagctttattttgcaattttttattttaattttttggttaaaactaaactaaccataaagttatgttttggaagtttagatatttcccttttggatttagataatcagtatcactctgagtcacatcatttactggacaactttaaacaaganaaatagagtagcttatga

SEQ ID NO: 28909 - DNA, 612 bp, Arabidopsis thaliana columbia
agtactttccgatttgcttcaccaaactcgttcaagttgaccaccggcggttgaaaggttgaggacggtggatgataaacgaattccatcaatataatggaatgatttgatgaacaaaaatgcgtgagttgatgaacgtcacagagctcaatcgccatcgcaacataaaagagaagagagagatcgagaaataagaagaaacacgggcgcaggaaataaaaattgtaatgtcaaaacagacatccaataataaatggccacatcatcgaactttaacaccaagaaaaactctaagcttaggttcgcacctaaccttatatcttatttttcatttaatttttgcctaattttgttaaggatttttgctaagaaatcatcaaggtcccccactggacctgctctaatgcagcatgatcaacacatcgctagagatattagcatgatccaaatgctatgatttgactcggatgagtcataggtcgatcatgttcgaacctattatgtatttaattgatttttatatattttctaacatcagtttctcttctctagagttggatttacaccaaacttcctcttgatattttggattccactgtagtgaagaatctt

SEQ ID NO: 28910 - DNA, 810 bp, Arabidopsis thaliana columbia
aaatatgcaaaccgctttaaaaaaaaagatggtgtcgtctcataattgggcctcactatcaattgggcttgggcttaatatcttactttcttttttttttcgtcaaagtgttaattaagttcatacttcataactactcatacctcaaccggtttatgatctgagtgggcattacaaatatttggcttaaccggttccgagccatttgtaatttccgagtatctacatcgccggcgattgattctgctcatcttttcgatgccctctccgtctgcagtcgccgatctcttggccgctcttgcttacaggcttcagaacggagatgaattattcgaagaagaagaagaagcggaagagtctacttcttctatgggactagctatctcggagcttaaccgatctctgactctggatatcggctgcgaggattctggggtcagggttgtggacgcagcgttatctataatgtgcttcaaggcacctcaggttagtatcatatctatcctggacttgcattgtttctacgtagctgagttcttacttgtgagtgattttcttattaaaattcaggtttttgattcggcaattgagtttatggtacgaacaattgtttgcgccttatcatcttcaagcaattgtaaggtaattaggtatcgaaacgaggaaacattacagtttgggagcccaatttacctggctgctctgaagaattgatcgaaatctctaaggatattattgagaaactgtggggaaatggtgcgtttgatttagcttatcctagagttatctgaagattttaacttttgtttg

SEQ ID NO: 28911 - DNA, 464 bp, Arabidopsis thaliana columbia
agaagatcatacatagaaatccctagaggtgagagatacgaaagcatagacttagaagatagtgttgtcttcctctgagcatgcatttgagtaaaagaacacgtgttgatagattcaaacgtaggcttcccagctaagtcaagaacagctagcttccaggttaatatgccatcttagaagcagaagctacatgacaactggtatacttaactagtcctccaaacaaaagcacataggaatcatgaaacagaaaacctactaacaaaccaacaaagatatagagcaaaacaatcaaaggatttcacactctcatgttaacttcttgaactaatacatttatgaccaaagagtgccacaaagtttgtcgagataacagacttgaccttaatgtggcaaccgctaaaattacgatccagctcggaaggagaaaccaagttccgaaatttcatcactagattatatac

SEQ ID NO: 28912 - DNA, 432 bp, Arabidopsis thaliana columbia
aaatctgtgtacatatatttttgatattttttgttagtcttattttattctatatagatttatttttaaggttgatattttgaactatcgaattatttttcacttttgttgatttaatttttgtctccgtcgactagatttaaaacagttgacttatgttatggccagttgatttataacatagtaaatcttttgaactgttgacttacttttttttgtttatcaatttttaatttaatgtgtagacttgtttattcaccgtagacttactttattctacgttgtcttatcataaaatctatttataaaatgtcgagttaaattttatttttgtcaattaaatttatttgttttgatttattttaaaatagtctacttatattttgttaattgtttttttatgtagtcaaatttttgaaagtgtttacttat

SEQ ID NO: 28913 - DNA, 585 bp, Arabidopsis thaliana columbia
  unsure (1)..(585): unsure at all n locations
gaagacatcaaatcatgtaatggctatttttaaccttttttagaacaaatcttattcctatgtacattaccaacatccttattgatcattgtctctttgtaaacgcattgaattctcaagccaaaaagctctaaccgataagttaaccaatcaaacaaaagagataacacaatctcagtaacaaacagaattgaaaaaggacaaatactcgtgtaagaagctgggaccaaagacaaacacagaaaaataggtatgggcttaagtaaacatgcaatttaatcagtgtctgggttttgccaacaagtgtcactctcccctcttctgttactggtccccggagttcactgctcagttttgtttccttttcaaaggactaaaaattctgacttgtcatacaaattgagcttaggttttatctggttttggttaaacacaaagttagtcagaatccaacaaagcaaaagcagattattaaggtattgaattgacaatcaagagaatatatgatctcttgaagctttcagatttagtacntaataactaacagtcaaacactaaaagctgtgactttaagatcacaagttg

SEQ ID NO: 28914 - DNA, 637 bp, Arabidopsis thaliana columbia
gatacctttctcatatataccaaaattatctttaacttgacgttttattcttcaagtcttttgctatacgtcaaatttaattacgtgtttgtttgttatctacgatgtatataaaagatgatttattatccgagttcaatgctctcaacgagtttataattgttcatatcatcgtttttggcgtttatcacgttgcattgaaagggcacccttggcttaataagaaatacaaaagaatttcacacaacatactactacagttagtttctgataaccttaatctttttactactcacctaataatgttttttttggttgtaaattggaaaaagatctagtatgttcttcgatgattcatttcgttttaaataggcaattaattctgttgtcgtaataacaattattagtggaccattgtgcctacttgtaatggaccatatcccataccgcgtctcggtttgtatttctaaaatcatcacattaaaataatatacttcatgctaagtttcctgaaatgtatatcattaatttctataaattcccatgaagattattatttttttaattatcgtctagcaatgtggttttaaatataattttgccatacggattcaaatttcatagattgaaatgtgat

SEQ ID NO: 28915 - DNA, 631 bp, Arabidopsis thaliana
ttttataattcctcttctttttgttcatagctttgtaattatagtcttatttctctttaaggctcaataagaggaggtactattactacacttctctctacttttacttgtattttagcattaaaatcctaaaatccgttttaaattcaaaaataaacttagagatgtttaatctcgattcggtttttcggctttaggagaataattatatgaaattagtatggatatctttactagtttccattcaaatgattctgatttcaatctaatactctcactctttaattaaactatatgtagtgtaatttcacactgttaaatttctaccatgtcatgtatattagagttgcatagaaaattgtaaaacatccatttgaattcgaatgaaacaaaatgttttaaaataaaattttggtttttaaaagaaaaatctaaaactgaattatatcgtttaaccaagttgtaaaagtcataaaacgtagtatcttgtaaatcgctcttccacggtccaaatagacttctagtaataaacaagtaaaactaattttggtttctatctaattaaaacagatgggtgaaacgctgccgccaataaccaccgtcaccaccaccatcacggccaccaggtctt

SEQ ID NO: 28916 - DNA, 707 bp, Arabidopsis thaliana columbia
tataggatcccctatgttgaccaatatctgaaataataaatattttaggtaccttttttttttttggcacactgtatatgagaatcttaaagtaaccatttttgaagaaaaattggccccttttttttttttgataaaggggtttcaaaataaatgcataaaaagtatagaaatgaggttatatagttttggaaagtagatgaaagagaaaaacatacaattaaagtagattctaagattagagaaagaaaacgcaatggattaggtggatataattgcccttgtttacttgccatttgaaccaacaagattgtttgccccttacccttatcttatctgtaccgttgacatgaggatttattagaattgcaagatttttataatccattggtaactttccactcttgattacattaattttttgtttcttttatggatagaaacttacaattcaatgcaaatttttctaaccacatttaccaaccacaaaagtagatgaaaccaccctatctgctgacttcttgttctattcatttcatctttagagaaaatcaaaatcataatatttttgtttgtagtataacgtaacatacccaaaaaaaattcggaaaataaacatcttattgaacaagccacgaaacattaaacatacaaaacagaaaacaattaactataagatacatttagaaaatattaaataaaatgga

SEQ ID NO: 28917 - DNA, 742 bp, Arabidopsis thaliana columbia
tggcgggaaatttgttttggaatattttagacgaaaaatattaatatttcattttgttaacctaaaacagtttcaaaataggggtaaaatggtcattaaaaatttaaaaagggtagaaataaaaatggataaaacaaaagggtagagttgaaaaggggcatcatgaaaagggtattagaaagtatttttcttatttttttgtaaaaaaaattcagtcaaaaattttcaatcaaaaacttttacgccaaattttcccctaaaaaacattaatgaaggattctacaaaatttagaaaggattctaagcaacttaggaaatgtttcatgaaattcaaattattttttttgcgtaacatattctgatttcatgaaatccttcttgaattttgtacaatctttcttgaacctctataaattaatattcgataaactaataacctcaataaatttataaattatgccggtccctagttgggttcaatgtaaaaagtaagataagtagataaattaataagataataagttttttgaaagttatatgcaaatatatggtctcatcaaaatcataaattaataactatataaatgtatcaactatatgtatagattatatgtaagagagttcttgtaaaatataattctagcattgttgttatgcttaaattcgtattagtttttctttgaatttaattctaatattttactatatcagaaaattttggtattggttctaaatatgataa

SEQ ID NO: 28918 - DNA, 613 bp, Arabidopsis thaliana columbia
agtgaaatggtcgagtatagcgacgaactcgagtgaagttgagtcgactggctctttggtgagggatggcgattcgtggtggagtagagaaattggagtgtcggtggagagacgaagagagatgggtcgagtaggttttacttttagggaatgtgtggtcgagttcaaaaggtgtggtggagattgattatgtgattctctctccatcttttcttcaggaacaaaacgcgtggtccacactctgttgacttgtctttggactttgttccctgttgactgggaaaactttaggaaatcttctgtaaatttgataaactccctacaagtctctgtagctcttgttggtcgagtataatgatgatttaaaaaatatgggttttaaacctcacatatacttgactgatatactcgaattcatggtctccaggtgcaacagaaagttttaaaaattttgcactccactgggcaatacactcgatctccaggccttctgtagagtaaaagttttgaatttttactccatctcgcacgttgtttctttgttcctgagaccataaacacaacgaaaacaaatgaaaaattacaagaagtaaaaaatttatttacagagata

SEQ ID NO: 28919 - DNA, 1217 bp, Arabidopsis thaliana columbia
taacaaacctcggcagctgataacactgtattttactcattttaggtgtatgtttatcatcatttagctgtgcatttgctcatgtgatcttgctgagaaacataattttgtgcttgaagatgatcaagcttgtgacaaactaattctttccaaatcggtgcaaccgagtactacattttttttttcacaagttcttgaaggacaatctcaagaagaaggtcaaaagagtttgccatcgattgttactgatttggagaagcaaactgtaacacccaaattttggattgaaacgcgaggcccaaaccgagcctattacggagttaaacccgaaccaaaccctactattcccacgagtgtataaaagaaagacacaaacctcaaaacaagccttagaaacccttggccgtcaagttacaccctaagcctcgtatcgttgttttaagtctcacttccatatcggtttgatttcgtcctaactcgaacctcgtttgttgccttttatagcaccacccgagtcacctgagactctcgtcatgttgagcttgtgccgccgtgtgagatgtcgccaccggaacggtaaaaccatgacttaatcttagttctgatctctgtttttgttatggattgttaaatcaatctaactagtgagagctggaatcatcacagatctgtgttatcaaagcttccacttcgcctgttcagtccgtcaagtcaagccgacgagaaagttcgtagaaagaggtaacgacgaaaccttattctcgtatccatgctaaggtgttaaagtgtgttttgattattgaaccaaacccaaacaatctaaaccggaactgtgtaattaaatccttgcgctgaatgtagttattaaggacgagggttgatttttggtttggtggtaacttacgtgaaagtatgtttattaaattgaaattgtggagatgcttaaggtcacgaggcggcaatggttttagattattaagttagcttgtatctttcttttatacactcgttgaaattgtggaaactgttttgatttttgttgttgttagcctaaactaaaagtcagccgaattgctaagatgaggacatgttcgtgtttttcttcgtatataaatatatttacttgattacttaagccgaatatacttacgaattacaaatatatgaataatcgtatttgtgtggtgatgtgtgataataggggttttagtcaatta

SEQ ID NO: 28920 - DNA, 1233 bp, Arabidopsis thaliana columbia
cgtcggtagtgggtagcaaagtacgactgttttattttgtcgtcgcaaataagttgcaaagagcgactggtatgtgacgttttggaaaatacacttttgaaatccacatagatatatccaatctattgataaaaattactgaaaagcacccattttagttatatagagtacatacagaactttaggtatataaatcatcggtttcgtaacttattttagaacttgtttaaaaatatcaatcatgacaatgaaagaacatggaacttattatatagattaggttattttgaatgtttagtttgtaaatttccaaattgaagtgtttggttacgtatctatatctaatatcgatcaaattaaagtatcaatatctaagaaaacatataaacagaccaaaatttaaaatttcgaaacggaaaaatcgagagttggtacgacgtaggtaattggttgcaaagtacgactgttttcttttgtcgtcgcaaataagttgcaaagagcgactggtttgtgacgttttggaaaacttcagaacacaaacttttgaaatccacatagtttgatccaatctattgataaacattactgaaaagcactcactttagtgatatggagtacatacagaactttaggtatataaatcatctgtttcgtaacttattttagaacttgtttaaaaatatcaatcatgacaatgacacaacatggaacttattatatagattaagtttttttgaatttttagtttgtaaatttcggaattgaagtgtttggttatgtttttatatctaatatcgatcaaattaaagtatcaatttctaagaaaacatataaacacaccaaactttaaaatttcgaaacgcaaaaatcgagagttggtacgacgtagataattggttgcaaagtgcgactgttttcttttgtcgtcgcaaataagttgcaaagagcgactgctttgtgactttttggaaaacttcagaagacaaacttttgaaatccacatagtttgatccaatatattgataaaaattactgaaaagcacccactttagtgatatagagtacatacagaactttaggtatataaatcatcggcttcgtaacttattttagaatttgtttaaaaatatcagtcatgacaatgaaagaacatggaacttattatatagattaggtttttttgaatgtttagtttgtagatctccgaattgaagtgtttggttatgttattat

SEQ ID NO: 28921 - DNA, 627 bp, Arabidopsis thaliana columbia
tttacaaaaaaaaaaattgtcgtcttaaatttattatttattacaaattatgataagacgatgcattttactccttctccatgctcttcatgcacaccttcaatgatcttctctgcgtagaatcctggcgaacggctataattatacatcgttggagatctcttgtagttcattaatctgcaaatcttctaataaatggtagtattgggactcaacctcatacctcttagtgtagaaccattaatgaacccttccaccaaagtttttacaattaaaacttaaaataaaagaaaagccttaattaatcaccccataatctagtaggggtagtttttcataacatgaagaatactgaaagcatgtacagtatgttgcgtcatcatcataagctgttatttgcctaaggtgtgttagtctcttaagtcctttgtagtctttggactgattcgaaagattagtgtgatctcattatgaaataactttctcaaatctttttttgccaataatcagaaaccgctttttttttttcattgacggtgaccttggtgggattgatgcaagttttggtcttgtcttctgatagagtgatgaagacttctttcgagaataaaagttatggaagtggga

SEQ ID NO: 28922 - DNA, 511 bp, Arabidopsis thaliana columbia
cgccagtgtccagtgtgctctaaagacttgctggcggaaacatcgggagaaccaggaacaccagcaatccctgaggccggctgtgattggccggggcggttcttatcagcggaaaatccgcaatttcattctagaaagcccagattaggttagactagcctccgtggcccgctgtggcgctagggtgttatctacgccctatgataacggcccaatggcggatgattagcgttacctgaaagaaaatgctgataagcagaacgctgctggtgcagtgatggggatcctctggtctgcgcgaagggtttgttttataccgacaagagcgcgctgacggctcaagccctcgctgtctatcagtatcggcacgatagtttaagaagtgctgcaccaactgctatctctatcactatcgtagtccaggaccgcctctaagcataaatagaagtagtaattcctcgcgagccattcgccgagcgactcagaagacagagcggtttcggccttacga

SEQ ID NO: 28923 - DNA, 314 bp, Arabidopsis thaliana columbia
ttcttatctgacaagcattttttggatctcagtgatcattttgttatgagttttaatcgtcttctaactctctttaacgcaagaaactttgtttaccatatgctttgacgtatctcgttggttgactatctaacttcacgacagtgacatttaatcaaattgtctttgcatgcgtttccaacatttatttctgtcacaagcttaagattttctgccagacattatgatctgatacaggggaaacatttacattatcttttcttctttatatcattggatgtgttttatcaagaccaatggtgtctgtctctgtt

SEQ ID NO: 28924 - DNA, 427 bp, Arabidopsis thaliana columbia
tgaaaacctcctccttttggcaactttaataatagatccaattttcttggtttttccccccattatttggaaattataaccattttactacaagtgccttctaaattctacaacccaacaagtaaaacaaagatgctggtacatatcatacatcatagctagacaagaagtaatggatgtaattgttacgaaaaagttggtggcactaaaaacatgtgatggctaatgacccttagatatgtgtagataagcagactaatcatgcagaaataaatacaagattgtaaacatcgtaattgtctggacaatacatcatatgattataaacataagaccatttccaaaataaaattgtgtacggaaaaaaatgtagattaagctcacattactgtatacttcattacctccttaatctgcagacaaatgt

SEQ ID NO: 28925 - DNA, 460 bp, Arabidopsis thaliana columbia
tataagccgattcgtgggacggtacaaacattaatcttgacggtatttttttactaagattattttgacggtttttgtttaattttaacggttttttttgtactacaattaattttgacggtttgattatttgatatgtttcaatttatgacttattaaatagatagacatggaataaaggtaaggaatatatattgtttacaagttatgcaagattggaatatctcatcatgtaacaagattatcctaaaaacaccgacttataagaaattaactcttgcattatccttaaagtaagagggaacaaaaaaaacacataaagaagaaaatggaagggaaaatcaagataggaccagtgggaacggattattcaggtaagaaaacaatggtcgattgggatgaaggaagtcacaatggaatcatctctcaaatatttctatctcatggtcccaccggtgtt

SEQ ID NO: 28926 - DNA, 518 bp, Arabidopsis thaliana columbia
gagtagaggatcttaaatatattgcatattgactcccttaaaactctacgaaattcgttaatcattatttattacttaccaaaatttgatacacaatcttaactaaccatatctataattacttgattccaaaatcattatagctttaatgaaatcttaccaaactttaatctactcttatcaattttctagaaaacatatcagttattaaagttgctttaattccgtttacctcaaacaaacacttaatatatcatatgatcttacatttggtatagtaaatatattttgaaatatacttcattcatactcaaaattcttcctaatatcggtattgtgttatcaatctttaccaagtactatattctccatctaatttaaaatgtaaagtaatcttgcattccaaagatattttccgatttgaatcgcatcatcaattccctccattcctcatttatagcaatgcagtttcatgtttcagatatatcacaattaaattcttaaaagggttatggcat

SEQ ID NO: 28927 - DNA, 499 bp, Arabidopsis thaliana columbia
aagacgtgtaagtggagctattagcaatcgtgtaggacataatgattagcattttcatgtgccatgcccatgcatgaggcttttttttgtgtaaaattttattctattatatccgaattttgttatatactaaatgaacatttgtctctgatttggtctactagttaattaacctttagcttcactaataagaaatctcatgattttgatacttaaacccacaacatattaaaaacaattagcagtcttttaaatcgataatgtgcttagatgattatacgttcgtaggaaactcttttgtttccaatgcatgttaagaactaagaactcgtatccttaagcaccaatgctttatgcttaatgcctcattagagatataaactgagattgactgtgttctgaatcatcatagtatgaggcacacaaagtacagaacaggaaatacttagcaatataataggtttcaataaaagtgaagaagaatacaatagacttttat

SEQ ID NO: 28928 - DNA, 939 bp, Arabidopsis thaliana columbia
tattaatagaatactcctaaaatacacactattacccatagacatatacgtttagtctaaagtagaagcgaaaaatgtactacctaaaattcttagaaaaaagaagctctcgagtcgtttgacggataaaacaagaaagattgtagaaaaagaatgaaattcgttgattctttcgttcaacaagagaaaccgataagaataaaaagtaacgtaccacatctgtttcattatgtaagatgtttaaacaatcttatcttgtttcattttatttaaaattttcaagttttatgcattttttaatactatatatatcttattgtgttggggctatagcctataggtatcttgcgtgttatacaatgtgtgtttcgttggatttataatttctgcatcactaaatgctaaaacacgcccggtgaattattctttctacaatgttacctatatttcgtattttttttgtgaatacttggaaatacgtgtgttccaactgtatagtccatgctttttagttttgtaacagaaatttgttttttctcttagttgggatacaaacgtgtgaataaacacttattacgtatccacccattttgaattaagtttgccatccacacgggcacggctggcacaattgtgcatattcatacatttatgattcattcattttagaagtcaactgatccaacaaaaaataaaaaaattggaaatattatttactttcattgttagtttagtagtaataattaattgatttagttatttagtgttacccccgcatgagaagacttttttttatccctctaaaactaattattctctacgaaaatttcagtcgtctatacattaatttagcatccgatttaggaaaaagaagaagaaaagaattacgatcgacaacgaccagatttagtcaaatttggacgatgcatcttctgtagc

SEQ ID NO: 28929 - DNA, 904 bp, Arabidopsis thaliana columbia
caccacaagtcaaatgcagtttatttgtgaaattccctgattaagctaaacaacaagaaaaaaaaggaaacgaggaagggaaaataaagttatagggaaaaaacgaaacatatgaatcgaaagtacatcttttgtgatggcagcaatttgtaattcccccatacgattacaatcatgtttgtgggatcgggattcatgtgatctcactgcggtgagtttaatttttttaatacatatacttcattttgtttttaggatgttttacagtaaataaagtcaatactagtagttagccaatatgcttttaattagtagtatgcctaatcatctcccatgtcgtgattccagttcaatagcggccataactgcttaaggatgatgtgtaaattttagctcacgtacgccgttatgtttcaccataatgctagctagaataatctaattcacacttgattataagattttcaggttaggtttcattttatgaaaagtgtgtagtcaagattttaataaaattgttattttcagagttgtataaatgttgttttgtgctaatctctttacaaaaatggaataaaagatggattattaggggaataaaagatgcttaaaaattaactttttttttaaaaagggcaaaggtattgaaacatcaaaactgtcatggaactatgattgaatctcacatgctctgttttttcttcatctttattctttctcctctattttgtttaatggaaaagccttttctaaaagtaattacagtaaatttgttatgtttacataatgattatatatcaatcgttctactgtttaatcaccaaaattgaattattttttatattagccggctcctatgaaatggttgcatttcgaaatttcaatttggataaagaaaaaattc

SEQ ID NO: 28930 - DNA, 839 bp, Arabidopsis thaliana columbia
tttccaaccgtccttgccgtgaaatctcacaacatgcgtccaatataggtgggaaccgcaccgacgatacgcattaaatacttacaaaattttccttcattaattatttttaagcaacaagcttgaaatttagcatcacaaatgcgtcaagaacaaacaaaagaaagatgcattttttacaaaaattcttaaataaaaaactatttaaaaaacaaccaaaaacaaagaaggcataagaacaaaaacgacataaatatatgttaaaccattagaaatctaattagttctgaatccatattttatcattggaggacatatcatgtgtaatgttcgtgcccatagtgactaaagttgatctaacggtgtcaaaggcacaaagcggccttaacgtcgagcctccaagcaaaaccaccaccgacgtccattctccacacgtcgcaaggcaccgtgactgagcctctctcacgattttgacacgtgtactggagtttcattctgcatgtgaatccaggggacgttagcatcggcctctccctcatcaccaaccgtacgatcacgtgaaaactatcgccgctagttatctccggtgcaccttcttccacgggaataatatccctagccatcttccgatacgcgtcattagtccacgtgactctccctgaaccgtcggatatgaaaccaggacacgtgtctctcacaagattcatcttcctttcttcatctgacctccctaaaccgtaaccgtcaatccaagcgtccgttacacgctccaccgtcatacacgacgaaatcaccaccgtcctctgcacaatctccggtgtctgataagccggtgtgag

SEQ ID NO: 28931 - DNA, 537 bp, Arabidopsis thaliana columbia
ggaagatgaatcttgagagagacacgtgtcctggttttatatcggacggtttagggagagtcatttggacgaacggttcttacagagagttggtggttgggaaagatcatgagcagtgtagtaagatgagtgtgtggcttgtgatgaaggagaagcctttggtaacgtaccggacttttacgtgtagaatgagattgcagtacacgtgtcgtgataaggaggtgagttcgattacttcgttctgtgatgtttggaggatgagtgacggtggctttgcgtggcggcttgatgttgatgctgcactttgccttggacggtgaggattgggccgttggattagagatgatgttagattgatgagatgaggatatttaataacgacatgcaagttagatagatatttggacttccaactttatgagtgtacatacatatttcgcaattttgtagcttttaagttttaacattttgatttcaatgttctgttttaatttgtagtgtttggtgttttatcctcttcttttttggggtttgtat

SEQ ID NO: 28932 - DNA, 946 bp, Arabidopsis thaliana columbia
taccttcaatcgtttcgttgacacatttgagatccacattgtgcggtagcttcttcctctcagcgacatggacaaggttataggaggcatgattattatgatgatcacagggtaaaggctgaaacgatgaatgcttcactgatgaagatcctgctgagcttacttttggagctcctggttttgtgaaagcgttgttctcagtcgggaactcatatcaaagttattgctaccgacatgtgagcgatgattatggggggactctcattcatgttcgagtgacaatcatatgctgcttcagtcttttttataagatcctgactattattatcctgaagcgaagtgcttcctaagttcccaccagaaatcttattggcatttgaggctggattatacctgcacaagtccaacagtcgatctcatagttcttcaataaggcattcaaaaggttgtgtacggaagaaaaaacagaggtttgattctaagaaagtaccttgagaaagctgagccctctgaacgcctcagcacattccgatcatccctaactagtgtcccatcatctttagttcctctatgcctctttgaactatgttccacgtgcattagctcttcagaaattttaacagaagcttcatttgtatctaaagttttcaagtgagtgttaggcgcctcaggttctctgttatcttgaaggtggctagacatagctttgaaactcgagcctccatcttcatgcatttgtttacttgaaggactttcgctactgaggtccaatggtccttttccaactttcattttccatttactagagctcttttcaaacgaattatcctgtctcataatgccagtagttttagataggggttcatcttttggctccagggccagatcacagtttctacgaatgctaatctccaagtctctacccattgtgacatcttctgcaaaa

SEQ ID NO: 28933 - DNA, 494 bp, Arabidopsis thaliana columbia
aatcgttgataaaaaatttgttgaacttttgggttcttcctctatttaacttttagaggttcacttctcttacatctcttagttctctttaatgctttgtttcactcactcattttaactcaagcacaaaaagaaccttcactctcattctctcagtctttggttagtttcttgttttgacacgaagacataaaacgattagtaagagagagaaaagtgaaaacattagttgtcaacatttttgtattggattcaaagatagattcttattataagacatacacacacatattcatactagtttacttctactaagtacacacttgcattatgcttctacttagacctagaccttactttaagacatcattactctagtctctaaggtataccaagcttacaagcaaggtttaccaacaactcctacacaacaacaactctaacaactcttcactaagctatactttaactaacataacacacttactcattta

SEQ ID NO: 28934 - DNA, 868 bp, Arabidopsis thaliana columbia
gtgtccaaaaaatcaagtccaaatggtcacctagtaactcacatgtcgtctcatatcaatgcacaaatttagacatgaacagtaatcgtcgataaaaaattgttgagcttttggggttcttcctctatttaacttttagaggttcacttctcttacatctctcatttctcattaatgctttgcttaactcactcattttaacacaagcacaaaaagaaccttcactctctttctctctagtctttggttagtttcttgttttgacacgaagacataaaacgattagtaagagagagaaaagagaaaacattagttgtcaacatttttgtattggatctaaagataaattcttataacaagacatacacacatttgtggatggttataattgttaaatccaacttttaattttactgaaattacagaagatctctacaaggtctcaaaggctcacgttgtatccatgaagctaaagttcatgaaccaaaattagcaaaggctgtccacaacactgactgtcattatgatgtgtgtccatatatccaacgttttatggtagagtttatatagtatagtatgtgaatgtattaaccttgtggatgtaattgtatggttaattttgttcatttaataagattaaccaaattaattggtcatggtttccaaaataatctcgaatcctttgtaaaaaaaaactaatctgcgaaatataagtgaagagaatcagagctaagatccacgtttgagaggataacgcctcttgacggagatatgattgttggagcggcaaaaagatagggtctagaacttcgagagaaagagagaacgtaacttgcccaagtggttacaattttgatgcggttgttga

SEQ ID NO: 28935 - DNA, 525 bp, Arabidopsis thaliana columbia
ggttagctctcgtcaatggtgattgagtctgggactggtttcacttgagggtctctgttgcggtcgcacttagatttggttatcgaacttgttgtctgtggataatttattgagcatgtcaatcacctgtaaactaaggaaacaaaactactcaattatcccatcctagggatttctcatttaattgatttcttatttactctgctattgtttactacatcttgttacctgttgcttagtttttgcaatttttgcctgttactcgacctgatactcgaccacccagttgtctggtaagagactgtgcagtctagtatctgttggggtcggatttcacccaggtaaccgagccgaccatgatcgatgcctcagagatcacgtcgaagaaccatcccgagccggcctctaaacacctcggagatcacgtcgaggaaccatcccgagatgacctcgagaacgcctcggagcatcaccgcactaggtttccccgacccggtctcgaaatgcctcggatgcaacccggaa

SEQ ID NO: 28936 - DNA, 1077 bp, Arabidopsis thaliana columbia
tttaacgaccctatataaagtgtctcaggacttcacaaaagggtcatctttggtactcacaagaaacacataactttatacctattgagaactacgaatggcttgatcccttcacagggtacgtaggcaatccatcatggatgcagctatacctttttaaaaccctaactctttttctgttcttgaacaaaaccctaatgtatttcataagagattagaacatcttttgtaatcgagtcttggatagaatacctaatgaagagaaattactagatttgttttccctctctaaacaaatctattgtgtgaatccttggttcaacacttattgggttctaacaaagtagtcgaagtggcataaggaatcctatgtggaactgttcaactctcggtgcccggttatacctcacgcaattactaaacatcacatgtggttttctcgaatagcatcttatttgatttatggttggaatgatttcatcttgttggaatccttgacataaaatgtcagttcatgatggctgaacatgtttatggactttaatttgcccgtagtggtgctatatctattcgttatatttgtttacatatatttcctcatttaaccccttgtctgtggatttgaattttaacattacaccacgtattaataattaaacactcgcgtctttacttaatatcatgagtctgtttacaaaagggggaacagaaagtttttttctacacaaaagccaaaaaacagaacattatcctttgcctcgtggaaggtggtcttctatacggcaccgactggaattggggtcccttgattgcattctcaacgtagcttttagttgtcaccctaatcgccacatctaattgctaatatgtacattataccaagtgacccttccttttacataatatccatatgtgatggacttcccttacttatataacacaacatataactcatgaagaagacgcgagccacaataccccctgcagatgatattataaaaattgtatgacacaacatataactcatgaagaagacgcgagcacaatccccctgcagatgatattataaaattgtat

SEQ ID NO: 28937 - DNA, 1093 bp, Arabidopsis thaliana columbia
gttttctattgactaatcacattataatgaccaattatatcaacacaaatggataagtcaaattactcttttacaacttaataccagacaatcaatgttgagtagcagtaagaacaaagttaaatcaatatcctaatctggccataggatcacctaaagctctagcatccaagcttacatattatttcttaaatcaatgatttgatttcttccaaaatgtaagattaagaaatagaacctttatatggctttttccttgaattatcaaacaccaagctgtgcagtcatgtatggtcgtggacaatgattttcaattttgtaacgacacatacgctgcaaacaaaatgtgtggttgtccattacggattgtccaagtgttgtagtccatatgttcatcttctgtccaatagagaacctcaagtactgaatttcaaacaaactgggcagagaagttatcaaacattatcacagaattacgaacaagatctctgaagtcaacatgacaaaactttaccttagttgttccgaaattcttgaacttttctcgaagtaacctcaattgaaattgaaattgaatttggacagtacgagttaagggtttttcaagcaaagtaaatccaaatcgatttaagaaattgcagagatttagaggaaatgacaagagaattgggtttggtgttttacggttgaaagagcaaacgagagtgtagtgtgaaaagcagtggtggtggacagtgacggaggagatggatatcccgtcgccggagtccccttttcgagaaattgtaatttaggattttttattggatttggatttttacgattctggaaaaaaaatttaaatcacaaaggcaactacaaaatcgtggctccgtaaatctgaattggtttagtgaaaatggatttgatttgtttggttatagaaaaccgacgatacgagggtgaacaagtaattttaattagtcaaagtgcctaatgatttttaagtgcctaattacggataaacttttgaaaaagtgtctaatcacgtaatattctcaattatatatgcacctaaaaactttcttatcttggtttgaatatccatggaatt

SEQ ID NO: 28938 - DNA, 1038 bp, Arabidopsis thaliana columbia
agagcgttttttatagcctgaagttgagagcgtttttgtgcgtgccccttctctcatcccttgaggtgctttatataaggctttgagccgcccctcgcgatattcttgggagatttgttgttatctttgaggcggcaatgataaatctttatcttctgaagattttctcgagattttctctttgttgttaatatcctgaaatgatttccaaatatcatttccaggtctttcagatatggtatcttgaccatgcgtcgggtctatatctttcctttaggattgagatgttttggcttgagtgaattttcttccgagccgggtacctcttgtcggtttgtagtcaaacggctcgttttgtgcgagttagaccgtttacccgaagcgtttacgagattcgcctcggggtggtatcgtgaagtacccgaggcgctgctaaattcgggtcggaagattacccgcaggtctccgaggtgttttctaatctagctcgggatgattccttgatgcgatttccgaggtacttgtcatcggcccggagtacgcgtcttggaacgactcccgagccaaatatacccgacagatgtttctgaggcgttctcggagtttgtttagttggctcggttcctacgagaccaaatccgaccccaacagtcaataaacttttcgtttgaatctttaagaaaaaaacttttttgctctactttatgttctattattgtaagaaaatgttttaccttctaaattggttcttgactctatcacttctctttttttatgcggttttgatccttttcaccttcacgctttccaaacttaaagacatcaacttatatctttgggaacttgattccaattgatacgattcaggacacctcacattcacacccaatatcccttgtttctttaacgcttcacagatcaaacataccttaatccctctttacttcaccttcttgtgacataatctttcacatacttttttcctaaagtatctctttccatctttttatgattttgtctaccgctgtatctatcctc

SEQ ID NO: 28939 - DNA, 641 bp, Arabidopsis thaliana columbia
ttcactttacgattcaagttctaacttaatccaaattccgattatttaagtctaagtgagtaagcatgcatatgatctaaagacaagctctagaaaacatgcaaacaaacaaacaattcgaccacaactcacagatttggtagttcggaaggtttctaggtctcaggcgaatctcctagaccacagtcgacgatcctttactcacggtcaagttctctcgaccacaggcgaccaatttctagtcacgagtagagtttcctcgaccatgggcgacgattctctgaattcgggttagttattggtcgcacagccttacagtctcactctctctctcgccttaaaaatgaaatttggcgaagtgagttctatttatagcccgcctaaggtcggccagactaccccgcctgctgccacatgtctgaacagatgtcgtgcccacaggcgacaggtgtctcaggtcctacttcaactaaatggaatttttcgtaaagccatcctgaaagtaaggcttggcgacaagtggcgacaggtgtcactccaccgccccataagcttcggctccaagactcagccgacttcggctccaagattgattacttgagccgcaacgacctgcgagtgaggtgtcctaccatgtcagt

SEQ ID NO: 28940 - DNA, 471 bp, Arabidopsis thaliana columbia
ccgtttgtggattcatctatttctgaacatactgttaagtaccgaaaaattatggatgtttgttagagtatttgaatatgaaatcggaaagttcctcgaatggttttagatctggatggttgttcgattctgtttgagtccagtgcttttaaatcttatatgtttgatcttaacattttgatggttttgctttgcttgtgagttttacaatttgtaattagtagatccctgagagtctgaccattttgatttgttaggtggaaggtatggatgagttcatggatccatctcgtgactagtctactactagtgttgcaagaaatttgccaagtgctgctcgaactgctgctagaacaactcgaaggtagtccaccaatgatgctagtccgtcacagaattggtgatcgttcttgttatgtggtgagcaagtccttagctggagaaatggatcaagaaaacaaggacatgaat

SEQ ID NO: 28941 - DNA, 899 bp, Arabidopsis thaliana columbia
tgttagaacgtattgatgtagaaagtggaaaaaggtttcaagtcaacaaaatagagagtagcattagtagtaacagattcattaaccccctagacttacttcacaccgtcaccttggttgtggtgaccaaccggatgacctctctcctagcttaacatcggccatactcggcttagtattgtcgaattccatgttattaatctccattcgcatcttccttgaaacaaaacctaaaaccaccaataggtataacaaaacaaaataaataaaaacatacctaagatagaattgatcttgtttttgtcaatatggccacaaatacgatcaaaatcatggtgacggatggtgtgaatggatggcaggcagttgcggtgcttggccaaaagggtggagtgggtgggcaataagcggtcgggtgttggatggggtcgccggtcgttgggatgggcagaatggttgcgggttaaacgaatcaattggcgagccgatcggccgtgacggtgcaacttcccttattaattcacgtgtggccgttgttggccaagttttggccggctgatttcaggtttggccagaccggcaggcttggtagtatattgcccgaactggtgggcaactcaggccaaagtgtggcacactcgggcggactccggctaaatgtcagctcgcattggcgagctccaaccaaagtttgacacggttgggctgacttctccaggcggcaccggttactcggatgagtagtcgggcgggttgtcacggtgcctagtgacggggccaggtaaccctccttcattctgttctttttaagtttttttgttttctctttttccatttattttttattttttataaaaagctgaaacaaatactgaaatgatcaaaagcaaaagcaatag

SEQ ID NO: 28942 - DNA, 515 bp, Arabidopsis thaliana columbia
taaagatttttggtatcatacaaaggaaaatttataaaaaagaaagagtgaatgggccattgatcaatcatcttcatcagcataaaggacctacattttcatcccaatccagaactttagcgttggacaaatcaaattgatatcccattaggtcttgctttgtttttgtttcttttttgttggtttatgtatgcgtttgtattagtatttacaagttaagataatgtgttcattgtcaaattgtaaaagggttttatacatgatatcaatgcaaatacatatatttggggtttgaaataaccaaaatcttaaatcttcataacttgggaaataatgtgaataagcatttctttacaaatgaacattgtacttgtagacacactatgaacatattcatgagcgtgaacaaaaagtgagtacatatatgttttataacgaagagaattcaaattcaaagactctctaaagcttaaaattcgattcttcttttgcaaaaatagattttgtatgctttt

SEQ ID NO: 28943 - DNA, 516 bp, Arabidopsis thaliana columbia
ctctagagcgtatgtactacagagaggactctagaaggacagcaaatggagacagttgtggcaaacgagggaacaaagacagctagaacattgaattgtggggtaactatgtcacaacaaactcccgttgaagacgaaaacctagctgacacttgctggcgcatccatggcaacaccacaaaccaaaatcttaatgttgtcgtcattagactcttcgtttggaacaccgagttccccttctaccagttttaagacacctattcccaaagaattctcgaaaattaaatctttgggagagatatgatgtctctcggttctgacacgcttactgtttagcatatatcgcactttaattttgataggcggataggggttaataggtcattattttgctacatagacgatccaaatagtgtagatttcagttagttaaataacgagtcttctttggtcatcgagatagaaaccttattttattatataaaatatggtttcaaagttactactcacatgatt

SEQ ID NO: 28944 - DNA, 265 bp, Arabidopsis thaliana columbia
tgactacatacttaggaaaaaagttaaatgtactcatgactctttgtagatttgcacacagaaagtgatacttttaagggtcatgtgcaagactagccacatttgataactgacttcagaatatagcataatatacggattatctccgaaagtagcgtataagggttgtaaacagccaattgtggtgctaaatagttggtgagagctgagttagtaactctgcatctagattccaccgattgttatgtgaagaggcatatatctc

SEQ ID NO: 28945 - DNA, 559 bp, Arabidopsis thaliana columbia
accatatgtataccatcccctctaaaccttatctttacttcccaaatgctgtttgtacatcaaattaaaaaccggaaagtacttgtgcaatcaatgtcccaaggtgtggttcccttgctttacaggtttgttgctgctgaattcttgctcatgattcagcggtgtagccagtgctttgcggtgttgatagcgatagaacgtccctgattcgaaacccattgccccagaaagaggcaaggcatagacccattatggccattacaactacagagcaagctgctggcacggcttggctgctaccaaggaactggcttgcaagaagcccggctaatgtggagctttgcattcccgtgcaaagggagatagtccggcttacttcttcctcttgtctggttaaatgatccaacaacataacccaataaattttctaagttctatggattaagaaaaatgttgaagagatacaaaaagaacatggatgttggagttaccgaagcctgggatcttagagaaccaatatcctaaggcaaatgctacggcatggaatgtacaattggac

SEQ ID NO: 28946 - DNA, 487 bp, Arabidopsis thaliana columbia
atactctttctctttggatcaaaatacaccacatggaaggattcatacacactcattggcgtataaacaaactcaccagcatcagtaacacccttcaaaattaaacacgcccattctttgtcagacagaggaaaattcaaagacataaagagacatatttcaacaccgaacggccatggaaccaggccacctacagcatcatcttcacaaccttgagcttctccaaaacatttctcattggatctcatgataaaaagccagagaagtaataagcaaatggctggcaagttctgctcttgattgtgattctctgcttgattttgtccgtttttgaatatgaataagcaaacgtggctcgcatgaaaaatgctagacacagagcagtctctgtttatacagactacaacaatagtttgcactatccacattgtcatataacatgctgggataaatatcttgagattaaggaatccttacaaatcattac

SEQ ID NO: 28947 - DNA, 861 bp, Arabidopsis thaliana columbia
atctacttttgtgtttgacttagtcgatttgaacttgtctcgatctatttctatttattcattcgatctaaacttgtctctgatctcatcctattattcattcgatacgatcttgtcccgatataaaatttgtcccgagtgtaacaaaaattgtcctcgattgcaattaatgcaattgcttccgtttctctctccaacacatctttattctcacaagggtacaattgtccacaaaatgtggtagaaatgtcaatgaatttttgattgtcgtataattggaaaggttttgtcataatgtggtaatcgtagagttcttccttccaacgaaaaacgtagagttcttccttccaaagagatggattacattagtgtcaagtgaaccttcaacccacgggcttgggcccacatgctttgacattagtgtcaagcatgttttcattaatactctaagcacgctaaagatgacaagttctacaagtttagataatacaaaaataagattacaagcatctaaggatgcaacataaaaagaacatgaatagacaaacgatgagtctaaaagatcttggagacaattgttgaggttgccacaagcaagaaaacggttagtcgggatcatgacaacgaacacttcaggcagtgagagattacccacagttattagacatagtgacactgaaaagcatccaaaaccttgatactcgctgatgcgtgacactctacacgaagtagtgaaaggattgtggagctcgggtgcttgctcggcttagtagcctgaagccaacgacattaagtttcatagagagttcctccatataggaggagggttggaaaaatgttctcaaattcaaagaagatgga

SEQ ID NO: 28948 - DNA, 694 bp, Arabidopsis thaliana columbia
aataaggattagactcttgattgagagatcgtctaggaagaagagaagaagaaccctgcaatgtaacagttgagttaaaagatttaggaacacaaaaatccaaacctcatactgaaactactagaaaaacttcatcagttacaaacagactgagaaaaacttacttttaatccacagaagcttttgatatgatatcaaagaacaaagcctaattttgttatagatacgagaagacgataaacctaaatcaaaacggaaaaaagaaaaaaaaaactaatgcttgctaagtgtgctaactactagatagaggcaaatcaaatattctatagatattataaactaacttaagatattaaaaaccctaaatatttaagctaaatttcaatagatactcaaaatcaaattaacaacatacacacgcaaagaataataaaaatggaaactttaggattaaaacagaaaatgtaaatgtacctctctatgattattactgttactattggttttatctccatcgattttgcgtctcaccggaatattccttctcggaggatctgaaacaactgtgtcaatggagcctccgacgacagcatccgttgaaaacccaactccaggaccacaccaaacatcaggaatcgtgcgcaagcgacgctactactagtactacgtcgctcaagatcttaatcgaaccacc

SEQ ID NO: 28949 - DNA, 1282 bp, Arabidopsis thaliana columbia
ccatttgcttgtggctagatcgaggacatatggttaacttattaggagtttgattaataattatataaaagttgtatgaacaccattgtaagagctttagaaaaaaaagtaatttgaaaccttacaaagagttcttctcttctgtttttttttttttgcagatcttcgttcatctcttctgatactactaagataaagttagagatagctccgtgagggagaaatgtacttaaaaaaaaaaaaaacaattccgttttgaaaaatggacatctcttcccaccaatatcaatgtttggaggtttgttaccttggagcttacggatcgcaactactcgttttgatgtaatcacaactcctaacttcaaacacacacccttttggttacaagagatggtagaggctgaagagcccaaactattacctctatcttctcagaaatctcttcttgtgaagagtagacatattatgtttgatgaaaatttagagagatgtcaattgtaagaaacatagatagattaataaccaatatagtccttaaatgcaaagcagagaaagaagtttcagagattgcaatagttttggagcaactaaacaaaacagccatttacacaatttcgtagagttaaggtatgattgacgcttgagatgtggaaagactacaagctgctgggattcgtagctacaatggcctggtggaacaaatcttgaagaaacccagctgtgtgattggcttacctatggcccgacttgaccaaatcactgaggcatctcaagttatactggtaattagtctaatagctaagattctcacaatatatcttgtttatatattgctttgcattgaacgtccaggagaagagagaatagagaagagagcagagaactattgctttgcttatatatttctttgttttgtttgtgtgcaggagaagagagcggagaactattggaagactaggacatcatcgaaagaaaagcactcttgcaacgctatcttcgttttaaaaaggtgatatatctaataatattcttaaatgttaccttgacttatagtgataacttccaacttcttcagttttcggttttttattctcttcgttttttcttttccagaggattgctaccttaactacatccatcgagttaaacattgctggtcgttgtagtgcatctcaagtacaaattgatcactgggagctagagcactctcttgcgagataagagcggtcaacatggagcgcaacaacaatttctaagggaggaagaaaattcaatagttatg

SEQ ID NO: 28950 - DNA, 1066 bp, Arabidopsis thaliana
cattcagttccgaggatttggggagtttggtctgcaaacgacaagacgaataaaataaaataatgagaaatacactatttagtgttttgttttgaatttggtttgttcaatacttatgacagatctattgaatatcgttttcaccattattacggaatattttctataattggcatcattgtagtcttgcttttacaataggcgtgttaggttaacatatgcaacttcaggcaaaactcaattcaaattttaaaccaggtttcaaaagtaaaaactaccagagagattcacattgacaaaatcaaatgatgtaaaaaggaatcgttggtttgaagtttgaaccaaaccagagatttggtttggagtagaccggaaccactgacctattgactaaaagagtcaaaggatgcaatcttgtgacgcgtgtaatcaacgcgcatgacctatggtccgtattaaaaaggttactctatatgtatcacactttagcttctccattcccaattgtctcttcttttctttttgtacttgtcaaaaacaaaaagaacaacaaaaaaaatctcaaccgtagaaaattccgacaagagttcagttcatacaatgaactaagtatgggttctttgggagactgttcggaagtaagaagcaagaaaaggcaacaccgaacagacgaagatggagcttcgctactagatcctcacatcccgagaatgattcgtcttctcattcaagcaagagacgtggggatgaagatgtcttaaacggcgacaagcatgcgatacgcgtcgcggctgctacagctgcagtggctgaatccgcactcgctgctgctcgtgcggcggcggaagtcgtgagactcaccaatggtggtagaaactcgtcggtaaaacaaatcagtcggagtaatcgtcggtggtctcaagagtataaagcagctatgaagattcaatccgcttttcgtggctacttggtgagttaattactctctaagtgtaatcttaatactcaacttcataatctataattttgtttgaaagaaattaggtttttgagcacagtgtggaat

SEQ ID NO: 28951 - DNA, 443 bp, Arabidopsis thaliana columbia
gggtaccgagctagtatttaaatttagagaaaacaaaataaatatcaactttttattgagttttcaaataaatatctaacatttattatttaaataattataaatcttagttacatttatattttaagccatattccaaattataactagaaatgggtgagtaaaaaaaaatcataccgctctacaagtaaattatttaattagaagttaatatttaataaatttaaattgtagttttaattggtaattaaaatttaaattagagttataacacacaaacaaactaacgaaaaattaattttgtacaacatgtcaacaagaaataaactttcaattttagtttcgaacatgaactatacaaaaattgaaacaacattaaaaataaattttaaaatatgaagaataaaaagtaagtcaaataagaagcaaaatagaagtagatt

SEQ ID NO: 28952 - DNA, 596 bp, Arabidopsis thaliana columbia
taatccgtagaggaggggtaaccacgcaatgaggccagaccaatcagcaaaattgagatgtggctgtcctagtattgacagaacaatgctctagatttgagaacatacagggtaatgaaataacaaatgatctctagtctcaaaccaaatgataaaaatattattcaagttctattgagtagtaaaggaccaagtgaccaagtctgcatggatttttttctaaaaactttatattaattggggttggacttcacttatatataaataactaaattttaacccgcggtacaccgcggagacaatttatttttttaaattagtatatatataaaattttgcaaattatatctatttataaaatatttttatcttatagtttacaattgttattaaataacgtccttccaaacccgttccgccaaactcgtcctgtaaaaaaaaccgcggtaccccgttaatttaaatttataattaaaataaatattttacgggattgcaattgtgttttagtttgtcaacaaaattttgttttaaatagttgtcgaaatctagttcaaattttggagaaataagatttagtgaattgataagaaata

SEQ ID NO: 28953 - DNA, 1378 bp, Arabidopsis thaliana columbia
caaactattctgaacactatactctaattagcagatgattttttgcctgtttgaagaaagtcattacgttgttgcattgaatagaaaatgtactagttacgatataagaaatcaaagttaaatagactgaaagacttctcaagaaacagaaagttgaactgaataagtaactttgaatacaagataagaaaaatgaaacaacgtatagtagttatataacatcgtttaagggtgttttagttatggacttaataatatatcaatgaattaggaaatttaagaaatcgttgaataatacagaatagaaataggacgaaaggggtcaattttttaagttccgacgtcggccaatgagtcattgagcaaggatcatgaccacatacgagtgctatggtaccattcaataaatccttgtcctataagactttactataatgtttttttttttcggttgtttggtcgacttaatttaaaccttgatgtgatggaaatcgagatgttgcttctaggactctgcatgcaccttaatgcacgtcttaaacaagtacgggtgagtctcaagggaaggtgaagaatcaatctctaggaattgacggaaggtcaccactagacgatcaacctgctgtatggcttatggcgaactgagaacgtagtcggttgagggcgctacgaggcgatgccgtttcgagctggtggttctggcgagctggctcttcttgctaagttggcttgtcttgacgggatgtcttctctctacgagctgacttgtatcgatgagcggacttgtcctgacgagctgaattgtcttgacgagctgacttgtcttgacgagctgacttgtcttgtcctttctccaggtctcccaaaaaaaatgtcctttcccgagactttctattccttatttatacccgtccgtgtagtagggtacgcaaggtgaattcccgagagtgcccttttctgcgcagccgaactcacatctcgaccaggccgggtttcggccggcgggccggctcgagttctaaagtgatggtcggggctgggtcgatattccttgaaatgggccggttgatcactgaggcccaattgatgtatcaacacatatctaagattattcaacttcatgtgaatgagcaagcaccttttttctgttttattagacttagacatttttaattgtctccaaaaattgtatacttaacaaaaaattgaagctcgaatttcatcaaatcatgtttatttattggattattttagtatgtaggagttgtcttatcctggttactctaattaacatattaatggtagtggctggtgatcgagaaacaatataaactaattcaagtgcacattattttcacgatattacgctagttatatc

SEQ ID NO: 28954 - DNA, 650 bp, Arabidopsis thaliana columbia
atatataataagttaaaacccacgttgtatcgtaaattattaataaaataaaatattttatttttagacaccataaaataacatattaattaaattaatgtttatccaaaattataaaattaatgtcatatcatctaataattaatagttaattgagctggtaagggtaaaattggaattttatttttgttgtcagatcgtgaatgtgaaaatagccatatttaatattttggatattaaattacaaagttttattactttgtgtatatttcttccgaacaaaaataattggatattaaaggtccaaataaaaattagctgaggttgtttttagattttttcccttaattaatatgagcgtttgttatattgttatgggggcatctaatagctctttccaacgtgtatataaggaacaaattttttttttgttgttgtttttttaggaacatatattcaacgttaaccatacaaataatacaatgactaaactaatctcatgatctatcaggtggcacatcggttttataattatcacaagtttctacatttctttactatacctgtactattacaaattttcaaattaaggaaactaaatataataaaatgtttagcattcatccgcctattaagttttcctatatata

SEQ ID NO: 28955 - DNA, 572 bp, Arabidopsis thaliana columbia
tcaaacacttatccgcgaaatagaaatcatctggcaaaacaggatcgatcgctcccaggtggggatcgatcgatccaccagtcatctgttgaagaaatccatccgccaccgagggactgaccgatcccaggtggggatcgatcgatccaaccctctcgacgaccagaccagtttttcttaaccggatttatccgtctttttctgtaattgggtataaaaaccccagagacctaattttatttggacgttttttcttttacgcttcttttctgtaacttttttagagctttcttaagcacatttgggattagagattcatccactttgacactttggagaagatttctgaaccttcatcttatttattcaatttgaattatgttttctttcatatctctttgtgttgttcattttgctatgagtgagtagtctcttaattgggtgttagggttctaagtagggggttcaatgaattgatggtttgattgttgtttggagttcttaatctttaagtctttaattcacatattcttaatgatagaataagattgatcatcctgttttagatacta

SEQ ID NO: 28956 - DNA, 598 bp, Arabidopsis thaliana columbia
atcagtaagaaactgaaagaaacttttctccgttcagagattagactgcgtgtggctgttttgctttgttcaccgactgggttgcattttgctgcgattgagttgcgttgtgaaaagttgtgagattctgattggtagagacgacggcgacgagagctgaggaggctggtgaaacagcagaggaagcaagaatcgctaaactgacatgagactcgtttctcacggccatggatttctcaagacgatgtatcgacattatctctccatcgttcatgacgctcactgtaaccaaaaccaaaatcagaaagactcattttctcgggaaaatcttttcttagattaaagaatcggagaaataaggaacctgagtgggagaaaatccagagggtgaagaaacagagaaaaacgatcaccggaattgcatggatccaatactccgataccggaaatatcctctccgggtgttcctgtccttctgccaatgtgagaagaagagatcgggagctgagagaatgatctttccgccattgttgtcttatcttgtagcttctcttccaagaatcacaatacccagtagagagagataagagagaagaga

SEQ ID NO: 28957 - DNA, 535 bp, Arabidopsis thaliana columbia
tttgcctgctaggcaagatgatacggtgaagagaggtaattggaaaaaaaaaatagatcgtgtattttattttcactcaaaattagtttgtgtatttttctgacaacgaaaaaagttcaggtagttttctggcagattttaaatagttcggtttttttttgggaattttcccaatgtttttaacacaacaatttgttttgtcttgcccaatgagattgaacaagacccaaaaaagaaaattttcaattctaagcaactgtgacagatatttatggccccactgactggtggtagaagccgttcatagtggtctgattattgcggagagagtttgtccatcgcagggatattatgacagtaagggagctatcataaaatctgagtgttgcagggagaactgtaccgtggaattgttgcagattgtatgtagttgaatacagcatcatatgaccgtaatgaggaacaaaaacaaaaacatctatagcactaaaaataaaaaatgtgtcaacagaaacaaagatttttatggaataaa

SEQ ID NO: 28958 - DNA, 975 bp, Arabidopsis thaliana columbia
gagagagagagagagagagagagagagatggtttcttacgttagaagagaagaagtgaagaaaagtgaagagtgaagagaaggaagcatatttataggaagagaactggcacgattactgaggcagactttttgacctaattttctatgtgttgcacagacattccgtctcgaaaaacgtgttcaagcggttattctccagtaaagctccagcaagtctagaaaagcgtgtcgaagataccgtttacccgaaacgggcccgatttatctcgaaaacgtgtcgaagccacgattcacacatgcatgttttcgattcgccttgaaaaacatgacaaagttactgttcacccgcaacgggtctgctttgtctcgaaaaacgtgtcgaagccacgattcacacggacatgtttcgattcgcctcgaaaaacgtgccaaagttactgttcacccgaaacgggcccggtttgtctcgaaaaacgtgtcgaagccacgattcattcaaacatgtttcggttcgcctcaaaaaacgtgccgaagttaatgttcacccgcaacaggtccggtttgtctcgaaaaacgtgccagaatcactcaaaccattttctgtcatgtgcctaactaatatatccaaattcttgagatacgcccgtcaagcttaaaaagactctcgcacaacggactaaggggggggggcttattgttggacatgggccttgccgcttcaatgttaggaggcccaaaacagatatcaataaagaagaggcccttttgccattaaaaaggcccattaggtcgagaagggcaaaatcataatttgcagaggagacaaaagggaatttaaggttcagattccctataaatagagagaaacacgattgggagcaggatccgatccagaggttattagctgagagacaaagagaattgttgccttacccgaaatcgttgcctagcccgacctcgtcgcctagcccga

SEQ ID NO: 28959 - DNA, 580 bp, Arabidopsis thaliana columbia
gctcttttaagtggtttcacctacaaatgcataaatgagacttcagctgttagaaaaaataagaattaggttatttctctagaaagaccttgaaacgaaagaaacctataatgttagttacataaggtatcaattacatgtgtacatcaactgaattactcctaacaggcgaaatttattggttcacagaaacctactagtttatacagagaaaattttctatcaatgaatgtgaagttggattgttacacatgacaaaaaaagaacatgacgtccaaattaattgcacaccacttcaaagagtttaaaacttatatcaactcccagaatttagggctatattatcatgaaaaaacgtagatacagaacaccacttcaaagagttcaaaacttatatcaactcccagaatttagtgctatattatcatgaaaaaacgtagatacagaacacgtcttttaactaggttgcatctgctcgcatgagccaatgcagaaaacatatgtttcagaatttcgtcactatagttgcagtgtcacgagcaactatagcttttcacaatgccaagaaatagacgaacat

SEQ ID NO: 28960 - DNA, 569 bp, Arabidopsis thaliana columbia
tgaaacaccaaaccatcgaattcataagaacacggaaaccaaattcagagaaaacaacagatagatagagatagagagagggagagcgatagagagagagaggtgaatgaatccgtaccgggggaaacgctacagcgccggagaagatttggtctgaagccaacaatactcggaggagagcttagtagatgagagagagaggtcggccgtgaaaattcaaactagggtttctactttatccattagtaggggtcgtccttaaaactttcctgaaataccggaattaccctttagttgattcactcagttcttttgtgtttttatttttcggtccctctttaagtaatctgtttgtcaaataacctctaagtttttgtttttggtcaaatagaaccattaagttaataacaatatgattaaaattatgtaatgcgtaatggttacaaaaagtttttgtgaatagaaacaattgtttctctttaattagtttccaaaattgaggtgtaactataactacccaaaaataaacattacatttttaacattctgttgcaatttgcacctggacg

SEQ ID NO: 28961 - DNA, 612 bp, Arabidopsis thaliana columbia
ctctagaggaattttggtcataatctcagcttacatacttgtttgacttttttagtatgacttacgacttttgtttctttttttgtaaatttactaataatataagtatgagaagaagacacgtgaagcgccaaaagacttgtggggagtgtataccggataaggtttgcatggtctctaagacctcaggttcttcctcacagtcctttctaaagaatcatcatccatggatgtacgttgtttgatctctccaaatcttttgaactcgaagattaaagtttccggcaatactcatcaccttcccttttcttccctctccaagaaacaccaagcttcttccgtatgttacttcttctctgctttctctacttttctttttgcactgcatgtgtttttatttggttctgggtttggatatgtaaagagtcctcacgttttggatccaaacccaatgttttagccgatacaggcagccattaatggaggagggagccaaaaacagtgaagcgtctgatcactttatctcctagtgaaggcaaatggaatggaaattggaagactcagtacgatgtctctctgcgtgatcttcaactccaagaccttgttgaagat

SEQ ID NO: 28962 - DNA, 620 bp, Arabidopsis thaliana columbia
tggttaatcctgattcctgcagttgcattcgctgcacggtaaaacagttgtgagcatttcagcgggtaaatactgggcatctgctgttactagtacaggtgaagtttacatgtgggatgggaagaatggtaaagatattgcaccatctctttctcgcctccacaacttgaaaagggcaaccacagttgctgttggcgaaactcatcttctggttgttggttctctgtatcatcctgcatatgctcctattgtgcttaagaagtctcagacactgcaagctgataaatgtagggaagaagaaaatgaagaactggatgagggttttatgtttgacgatgtggaatccgtgaacgtgttgcaatccgtgcaatacgataatcctaaggagaggatagtgcctagcttgaaaagtttatgcgagaaggtggccgcggagtgtattgtagagccacgaaatgctattcaattgcttgaaattgcggattcgcttggagcagaggatcttaagaagtactgtgaggtaatgcaaccttccctatgtgatgattcacactaaaccgtagagatcaaaacttagagaagtttatgttcagtgtctctttctatgttgtggctgatga

SEQ ID NO: 28963 - DNA, 482 bp, Arabidopsis thaliana columbia
tgaaagaccagtaataaaccataatgtctttaggtaatctattaatcaatcaacaaggtgttatagtttatgcccacttgaaaacacaatgtgttgattttcgaatcaatacgtaactttcaatctacaaatgaattataaagtcattcatttttggtattaaatacaagaaatatcgtccgagtcagccaatttaaaacgttaaagcccacctttaacttcgtccccaagccaaacttttaatttctcgattgtccgctacgctccacctcatcccaaacaaattacccgttttacccctttgttagataaagttaaaactatttgttagtttctttggtaaaacgaataatatcatattctccgtctatgttcgttattctgtttttaattttcggttcgttacagcttccacagcaagctcaaatggtaatatcattaatcatataagggcatttttgtcatttaacatgagtattata

SEQ ID NO: 28964 - DNA, 547 bp, Arabidopsis thaliana columbia
ctgcgacgccaatcattagtctcgagaggggacatagacttgctcagcagtccccgtctccaccttattatactcatcagacagtggttgtggttgtggttgctgctgggacattgatggtcgtagcgtcacaggtctattttgattcaccatcaagtgcccattttccctcatatctggaaaactagttgcaggaccatatccgttcattgtagccgccggaaataccagtccatgatggccagtaatattctctcggtgatggctaacaacaccacgtgtatccgcataatggatagagttatcaatagtacagttgtaattgttatgacaaacaacaccgcttgtgttagtacaatgattaccaaaatgattcatgttacttgaattatgaatattcatatatgagtggatgaaatcattcgaggtgttatacgaggtagagttggcgccatgacctgtagcggcgaagatggcaaaaataattgtgtaactgagggagaaatataaataatatctgtattaattgtatatataagaaaaaggc

SEQ ID NO: 28965 - DNA, 443 bp, Arabidopsis thaliana columbia
aaattgcatattaaaatgaatatttaaagcttttgtaagatagggaaatatagagaaatattatcttgttcggtagtcaacattaacaaaataaaataaaaattaaaacgttttagctgttaaaaaataaaaaccaaattaacgatgtatataaattagctagagctggctcgtttagtctggctcacggtttagtacatgcacacaaagcaaaaacgctggtttgtctttttaaaaaaaaagaacttcgtttctcttcaattccgttaccgtcactgtcaccgttcacctccgtttatctcatcctcaccgttcatcttcttcgatctaactcgccgtcgttcaccttataatggacaccgtcaacgattccttttcgccgggatctcccgaccttcgccggcgacgctttctcgtgaagattgctggagcgaggaagcgac

SEQ ID NO: 28966 - DNA, 245 bp, Arabidopsis thaliana columbia
tgaaattgcttatgcgttttgtcacagatccaaaaaatgacaaagagctgaggacgtgagatggtgttgtgtatgagacatacactgaagtgtgtgctgcgcgaggatttatgtaacaagagggatgtcattccatttcattcaactttttcgattcaatttcctttaagttctatgtttttattttcaatttctactttgttattcatactaaaaaataattcatgttttacttatgctttaag

SEQ ID NO: 28967 - DNA, 555 bp, Arabidopsis thaliana columbia
cgccagtgtgctgtaaaggagtatcattactacaatctggctacaattacttgttaatgccgagggtttgaaagagtgtggatagttcaacgccgcgttggagaggcgaagatggaggacaattgggaataggatggagaggacggtattcggatgagacagtggtcgatctgtctagttatgtcgcgagctctatacgcagaaaacttgggctgattgataaacatacacaacgccacagccgcataaacaagatacagtttcgcgctaatctgaaagtggttggacatgaaatggcctgttatataaatggttcacttagcatcgtgcgatctattatgtatatgttgttagacctgcaatttttctaggctctgtctcgccaggataaaataagatcagcagccttgctcaagttgctaaaacaaccaaatcagatcactcatatttttatctttgtgtatatgtgggcgaggtgagcatggtcagaaaactggtaagctgccaatcagggcgtggctcagaaattgatagattttgattttacgccgaggg

SEQ ID NO: 28968 - DNA, 610 bp, Arabidopsis thaliana columbia
atctaggatcctatgtttcataacaatgaggtatttgcttgtacatttgcagtgagtttgaaggattaagatggttggaagctcggatggtgaccagtcagatgatagctctcattttgagcgaggagtagatcatatctatgaagcattcatctgcccattgacaaaggaggttatgcatgatcctggtcactttagagaatggtcgaacattcgagcgtgaagccattgagaaatggttcaaggagtgtcgggacagtgggagacctccttcttgccctttgacatctcaggagctgactagcactgatgtaagcgccagactagctctgcgtaacactatcgaagagtggagatccaggaatgatgctgccaagcttgacattgctcgtcagtcactgtcatcagggaatgctgagacagatattttgcaagctttgatgcatgtgcgacacatttgcaggaccatccgatcaaataggcatggtgtacgaactctcagcttatccatatgatcatcgacatgttaaaaagtactagccatagagtgcggtataaggctctacaactctgcaagttgtcgttgaaggagatgatgagagcaaggttg

SEQ ID NO: 28969 - DNA, 500 bp, Arabidopsis thaliana columbia
gatctagtcattaatccaaccgccagatcgactcatataagggtagttcgggttcgggccaggggcaaaaccccttggactcatttcgaagtcactaggtggtggcggtggcagtggaaagtcatgaggatttaagagattatgtccgctaggttgcaatggaggctgaggtgggaaagagctcatcctctggtaattcatttgatcgaaatgaggcgcataacgttgttgcaatgggaatgcattgtccatcagatttggaggaggaggaggagctaacatggggtccaagtgcccaccgtactgctgtggatattctctttgaccaatccctctatcaaggtctgaatatcctcggaaatcaaacatctcgttaggaccatttctcaatggaaactgatccggtaggaaaggaggatccggcattctatagcctccaccgaaaccaccatacttagcagcaagaccatcgtcgaaatgggacaaacttgcaccataag

SEQ ID NO: 28970 - DNA, 543 bp, Arabidopsis thaliana columbia
gaaactttgagaaaccctttttaatctattttgttttcttagtggattctctcgatggtcgctgttgttgtttggtttctcgttgatcttgtgtttgtgttgtgttccagtgtccaccgctttgaatggttctacttctactaatttcatatcatttcatttgtatatctcccccttggctttggccttatctggtcgcgaccgtaattgagtccaagttcgtaattgtgattagggtctctttaatcagataattgtatttaaatcaaagagggatcgaataatattaaaaataagaatactatagttcttaatcgtatacctcgagagggggaatatgaatattgtacaaggaagatagatccaccataaatcatgccaacttgtcttatgtttatagcatatttctctatagtatttatattaaagtctcttgtgacttgtcgcgtactaaaactcctatatgaaattgcaagccattaatttaaaagtatatatatataagttaaattgaatttgaaaattgtaatgttttcatttagt

SEQ ID NO: 28971 - DNA, 794 bp, Arabidopsis thaliana columbia
tccagaccccagtactctaatattagaaaaactgaaacttcaaagcctgagagacttctccacgtttttccttcttaaatactaacaattgacaacaacaaacaaaatcatcgacaccaaacaagcttatataagtttcagatattaacctgccaaaaattccaaatggccagtgccagatgcacgatatgaaacaagatcacctaagagtcttgcaactgaacacacttcgtcttcctcaataacacccctgaagcagacaatcaaattctaagagtctgaactagtaaagttgctataaatctccagaaccaggacaaatgagtataaatgatttcagtattaaatcaggaaaacaaaacttgcatatattcacgacgtccaagacagcacaaaacttcacgaattccatggtcaaatacttcctggtagtgagctttccaggcatcatcttgggttgcatagaaagaccgccattgcaatatatctgatcccgtaaagcattgtgccagcgcaacaaagcaaacagtgatcaagaaggtaacctgaagtgtttgcttccacccaccagtgtccggagataaccctgagcaaagaagttactaaagagattcttaagcaagaaaaaatgcatagaaacaaaaagatatgccatgtttaacccaaacaaatatatatctcaagattataaatggccaagtatgtgactttagacaaagcacatgaatgtaaaatgtgttagtttcctaaaacgcgattccttggcaatctatcacgggaaacatatttggcga

SEQ ID NO: 28972 - DNA, 546 bp, Arabidopsis thaliana columbia
ttcccgacgataaatagtataagaaataaattattaaaatgataatttcctcagcgaatgttggaacgtcgtcgtttaaacatacgtgtaatgcgtgtgacttatctgtgtaacacgtgttaccccacgtgggacccactgagaaatgggtttgtcgagttggtacagaaaatttgccgacttattaaagctaaggaatttcgaaattcatatttttttagacagaaatacttcatgttatttaattttaataattaataaagaatttcgaaattaatatttttagacataatacttatttaattttaataatttaataaaggaaacattataaaatattacgcgtaatcttaaaatttatttacaaaaaatgttattcagttttaatgtatttgcgtatatgacttaaaatgttttcaagttgtaaaatggaagtttcgaagaatgtccacgtggggacgacaaggaagaggactgccacgtcagagtcgtagcaaggtgtaaatggatataggtggacacccatgtgacgtgtccaagattttg

SEQ ID NO: 28973 - DNA, 838 bp, Arabidopsis thaliana columbia
ttttcatacaaaagcaaaacttcttttttttttttttcttttgataaacattatcgactgatccggtcagtttcggtagaaacgcaccgaagtactttagagtggacttctccctgaaggaccaccacactgtctgtccggagtttgaaatgctttccgactaatgccagggggtagtcaggccgcctgcatttctgactatcaggtaaaccaattaggcaaaagcccaactgacagacttcccaaacaaatgtgatttgagaacttctttaataacatatattttttaaaaaaaacaatataatattaattaaaacattaaagcataaaatattcgtatactcaattgaaaaatacatagttgaggattagggaagatgctatgcatataattgggcaccattcttgcatgctccaatttgcaccatcaaccctttttcaactttttttccttttgagcatccatcacaataattataaattgcatcctcttttggttattatatctaagtggggtaggacgacaacaaaaagaaactattgaaaccattggcaaactaacagtggtttatataaaacataaaccaatgcatcaacctctggatcgaataacgactacgggtataagttaagaaaccaatcttatatattcttcttattaaaatctatgattgtttcaaaaatttaacgcagaatttacagttttggaacactagagttttcccagtgttgaaacccttgattattttcgaagttttggaaaaccttatttgtgtagcaagaaaaagtattatatatataccatatttggcatccctgttttggtattatagacttt

SEQ ID NO: 28974 - DNA, 496 bp, Arabidopsis thaliana columbia
tagtaacgtgccgccagtgtgctctaaagttgaattcattatcgtgttcgattctagaccttatttcgtaaataacacagtcccacgttatctagtgaactctacccctgcagttatgatgggcggagatgcggaattaaaaagcggatataagaggaataaatttatgcatcctgcttatataagaatgagctgtataatcagtcacatgattagccgtctgaccaaccgaaaagaatgatccatgcggactacagattcgcagaccttcactgaagggttgcggcgtggctaatttcgcaaaatgagtggtagcccgtattctcaacctgagtataatgcactggcaacctcgctgaaagtgggtgcccttagtggtacgtcaatcttcatcaaaatcccctgacaaggttttagcctcaccaaattatcggatcaacggcatcgcctgcatatagagtggcagacttctgatacagccatacaggctctgctg

SEQ ID NO: 28975 - DNA, 545 bp, Arabidopsis thaliana columbia
aaagtaaaaataactggagggccgttttattcagaatagtcaacctagtagtattcggatggtttccctccaaatatcgcgtacacgcatacgtagtcctgtcatacagtcgcccatcaatcgaacggcgtaagaagcaataggcatgtgatcttatctaacgtcttagacctatgaagtcatactaggccgcgtgaatttggaatgccaacagtccaaagtctcgactagccagctgacaaactgcacgcattgatttatagagtatcgctataatccccagaagttatgcaaatcggaccacgggcccgaagcatccggttgcatgcgcgcccctcacaacttttaggctccttccggatttctcgctccttccgcgaacctcggaggcggggcgggtgtcactttcatccatgccgttcacatattgtggcttagttccacgattactcagtttcagatctagttcctcttcgaccagacaagtcaggctacgaattccgatacaaaagacgactgcttccccggtcggattagtggtgcac

SEQ ID NO: 28976 - DNA, 1619 bp, Arabidopsis thaliana columbia
ccaaatcttacaaaccctaccctattctacctcaccttacaaaatctaccatatttcattgtcacatgcacatttgtgaacgaaattgcccttgatggtgacagactgatgtgtcagataaaggacaattggtgacagacttttgtttttctctccagatcttgtccccgtttagaaattctctgttgcgtctacgtcttgtcctccatttcatcatcttgctctattattattaatcctacatcttgtccaccaattattctcatttaaggatttcaaattttatttagattttttgctatctattttgattcacagattagttgaacgttattgacttcacctacacgtttacaattgcatataattttattttaataatacgttatatcgggaacaagttcatatcgaatgagtgatagaattagatcggggataaattcagatcgaatgatagacaagataatatgttataacttgatatttttgttattttgcaatcgaatgaaaaaaatcaaataatctgggtcagtgaagacaataatgctcaactaatctgtggaccaaaatagatgttgaaaaatctacataaaattcgaatccttaaatgaaaaacaattggtggataagatgtgagtttcatgataattttgaaagatggtgaaatcggggacaaaatctagatataacagaaaattttcaaatcggggataagatttggagacaaaaacaaaagttatttgtttagtctcaagaaatataatgtttattggttaaaggggatagagattaatagaaagaaaaaataaatagagaggaaagagaaatagagaggaaagagaaatagagaggagagataaataaggaagataaatatagagggtaaattagtaattttaataagaaatgtggtaggagttgtaagaggattgaaaatatggtagattgcataaggaattgaaaaaatggcaactgatgtaagaattctcaaaacaaatctaaaattataaaatataactttaactaaaccctaaaaactttatattattcaccctaggtacgtgcgggtgaggacctagtattatcttaaacataaaacaaaacaaacaatattaaaaaaaatataattgaaatttaaattatttagttataatctagattttaacttagccttgggagttcggtgagaacgggttattcgggtcaggttgttcggtttcgagaaaatttggtttttgaaaataaccgcctaattgaaccgaaattaacttcggttcgggtcaatcggtatatgagttatttggttatatgatttaatattaattccgaattataaaaattatttttctattttcgtttatttaccccaaattacaaaaaaaatagataacaggctaaaaacaaagcccaaacccattacatcattaaaataaagaaaaaatttacaacggacggcgacggccaatctctctaaatgcaaaggttttcgatattgattaacgccttgacggtgacacgcgcaacggacggcggcaacggacggcgacgaccgatctctctacctgcaaataattatccaccgactagatctatcatatatcataatcataaacatatgc

SEQ ID NO: 28977 - DNA, 605 bp, Arabidopsis thaliana columbia
gggggaggcgaaccaaatccatatgcctagcacgtctaatcaaatcctaaccaccatttaattctctacaggcatacgtaacattctaaattccatacctaagttccacaactatatccaacaggctttcatcgttgagactcatcaatcaagctaatattcaagaaccttctagactcattcctgtactataccatgataaatcaaccacgcaatcattcctttgtattctttctctccccagacttattctttttggagattagacatcggaatactcgcttcattagataggtattataatacccctacccaggactaggactaggccgaggaattttagtcgacgatttagcaagccgcaaaatcggaacaatcgaaagaagttcttacgggacaagtattgtttcgtcggaccaactatctggctgttttggagatagtcatgagcatgtgatccgggacctggatgcgtgagtcaataggaccgaggatttgggtgactgtgattcgtgtgttgatgtgttgacggaacgcgtaatcccgtcgttgttacgggtctacgagatgatcacagttggtaacggtaatgtccccgagtgcgt

SEQ ID NO: 28978 - DNA, 191 bp, Arabidopsis thaliana columbia
atcccctgcggcttagtaccatcattaacattgttggagctggattcccctccaggaatccacctacgaaaataccaagccaacccacaaagcccaccaagcccaccaagtagagaacctacgcaactgaagagcacatacgcgaatgggtatttgggcctgctaagcccggttacctgatgaagggagat

SEQ ID NO: 28979 - DNA, 821 bp, Arabidopsis thaliana columbia
ttcttattagttaaaataggtgtaatgttaatgatgtttttatagaaaagagataaattaaatgagatttttgtgtttcctttgtaatctgtgtgaagaaaccttaaaatacaattataatgaaattgaaggagtatctattgttggggtcggatttggtctcgtaggaaccgagccaaccaagcaatttccgagaacgcctcggaaaccaatctttcagatacttcggctcgggtatcatttcaggacgcacactccaggccgatgacaaatatctcggaaatcgcatcggagaaacatcccgagccagccttgaaaacacctcggggtcgctgcaagtaacctttcgacccgaccttaggaacgcctcgggtgctctcaggaaactaccccgaggcgaacctcagaagcactttgggtaaacgatttagctcgcgcgaaacgagccgtctagctacaggccgacaagaggcacccgactcggaagaaacttcgtaccaaggccaaagcaccttaaacccgaggaaaagactcagacccgatgcaagatcaagataccatttccgaaaaccccggaaatgatattgggaaatctttaaggatattatcgatagggagaagatcccgcgaaaatctacagaagataaagataaatcaccaccgcctctaagataacaatgaatctcccaagaatatcacgaggggcggttcacgaaaaccctatataaagtgcttcaagggaacaatacaggggacacgcacaaaaacgctctcaatttcaggctatcaaaaacgctctgattttgaaggcaaaacactta

SEQ ID NO: 28980 - DNA, 565 bp, Arabidopsis thaliana columbia
tagtaacggttgccagtgtgctctaaagcaagccagccaaagcttttagcaacaagtcattactattggcatatttccatccgctaagtgtatcattagccggaatatcaaataaactaagtaggggagaggacatacttcctccatatcccagccgtggtaatgacaacgcgcgtaatctgtataaggtctttggtgttttcaatgtagtagggcttcagccaaacatcagtccaggttgcagtttcaggggatgaatgttcctcacgtaccaacgtagcattcatatcctcatcaacgacaagcctctttaagtcaaagcccgctactaccggactggactttactattaatgacgacttcgccgagtgagaaagagtctcggtcgaagcacatacatttccttccatccattgatatggtcacccccaggcgtggcagtgctgatcattatcgtagggcagtcggccggttgcgtctcgccgactgcgtcaggttgcccactcaggcgtattgtctgtacatcatcgacagcgccgaatgggggtggatcccgttcttgtgg

SEQ ID NO: 28981 - DNA, 839 bp, Arabidopsis thaliana columbia
tgttgtcgtatgccttttcatcgcaaccatgttgttagagatggttgtctcgatcttctctttcccaagagatggtgtaatgcccctgaccttgactatgtggccggacgtacagtctgtcgagtagaatgcgagatctagccaaaaaaaggcaagatcagttcggccttttagtgtggcaagtcatgggtaaggagcattgaattggatcaagtccatgggtaaaggaatgacacaccatgagacggaccaagtttagctacgatgcgactatcggtaaaccccaaaaccattaggctagccctaagaactaggatagcttcaagaaaccttagtttcggtctaggaaaccttagaaggtcgagggaaatccatttggacagtgagatatgtgtatgggtcgtgaatggtcacgggattgatcggagagtgcggataagtgacgatagctggcttactcggttaattctggcatggaacgtgttatagtcctaaggaagccttgatttgcgtcatggaccctcaggagacattggaacggagtgtgccgtattaatgttcttgcggtctggtgacagatcgtaggtttcgccggaatgaggaaatggacggccaagattgaatcgtgcctcatgtttatcctttaaggctcaagcttatacatattccggtcatccttatccttttagggtcgtgcttatccatttttggatgatgtttatccgaaaaaatggaaggaaccaatcggaggccgattagtgtcttggagcggccgttggtcgacatttttcacattttgattggtccaaacacctcgtgcttgccttggccgacctaat

SEQ ID NO: 28982 - DNA, 647 bp, Arabidopsis thaliana
ctcaaagaatctaataaatctctaattagaccgtttgtaagtaaaagaaaaaaagcttcaagttcaatgaaaaataaagataatgattgggacttttaggtttgtttgtgcttctttaattattttctaacaaccttttatagaaaaaaaactctagactagtgaaaattcggagagtttcatgttgctgcgactacaccacgtctctatctaaacagaaaagggtcaggtaaaggagattaatgtaacaatcgcacacgtggcacctttttctttgtcgccttccaaatcattaattaaatttccatttatttattttctctgctgtcatcaccaataattttaatttaatttttaccaaaaccagaatcaaaattttgaacggagaagaagattgaattcagaaaggaagaggcagatctgttattctctgttgaagtctgattgatctgatcggagctattgcggaggaggggtttactgcaattgcacggtggtaatggctgcggttccgctgaaaacggcgtggacggagatgacgaaagagaggaagaagaagaggacgaggaggaggaagaagaagaagaagaagaagagaacggagatgaggctgaggaggagcacgtctcaaatatcagaggatgggt

SEQ ID NO: 28983 - DNA, 289 bp, Arabidopsis thaliana columbia
tcaagcacagaaagcaacaccattgctattgatagatacggtgaattggctgtcccatcctaagcatacaatgcgcgccttgagcttatcctggcatatatatatatactgcgcgcattcactagtgcagcggcatatacaccactcattctcaatgcgatcctagtctagagactatagtagtacctctcacaaacctcagattcgaaagagcccgagaatcgtatgtacaagcctttatcatatcgaagaccagttcgagtacaagctgtgacctctgcggctcttg

SEQ ID NO: 28984 - DNA, 1191 bp, Arabidopsis thaliana columbia
agagagtatgactatagaacagggtttagagatcttctctggaaatccaaagcttgataaatattcttcatttcacaagtcaagcctagagacttgaagagaaaagagagatctaaagacgaacaagaagaggacgacttttggggcggtgagaggcgcaggaggcagccttttttcgtgggtgcctttcagggtttcctctaaacttgtatttatagggcttcattaggtcaaaaggtagaaatgtcctttcgttgattaataagtgatgggccaagttcttgggcttctaagggttgctggaagtcggcggcaagaggaaggcaaggtgtggttgtgcgccctagtggtcggtgacagactcgagaggactcccgggtgcaagtcaccttggccggcggttttaaatagatcattttcaaaaccgcgattttaggagatgtcttcactcttcgggcgataacttctgatcggcttcatgggttgcttcgattttacttcgacgttaatcttgactcttctagctttcaaatgacaccgagaagttcctcatgccgagatcgggaagaccttggccggatgtgaaaacatctgaggcacataaactgttctaaaacggattttggttgacttctactcctttttgcatgaaaactcataattcttccttgaagctcaaatacttgaaatatgtcttgaagtgtcctttaactcttgatttctccatggaaaacctgataaaaacatagtaaaagtgggcgaaaatacgatgttatcaactcccccggacttacactttgcttgtcctcaagcaaacaacaaagccaagctggtggagagattttgaaaaagcgggaactctcctactatcagagaccatgtcctaaaagatatcatgtggacgtgtaaagacaaagacatcgcgttagaacattctcactatagacccaaaacgttcactatccttatccatccatctcagacctacaagagaactctagaatctcgtcagttaaccctctacatttatgaaaagtggcgtgcgattctcattagagggtgtcatttggggtagactacgtttggtatgaaagaggcttttggtgtttaagtggtggagttaactatttagggttacgtatagctcgaatgtaggatatgttgcaaacgcaagagagatagatcgcatga

SEQ ID NO: 28985 - DNA, 447 bp, Arabidopsis thaliana columbia
tgttaacatagataaaaacagaacatcaaccaaaacatttgttcttcatcttccatggttactagacatatgaagaacacatcacatagatgaattcaaatcaaatgtgcctatacttggtcatcgacatttgcatcattctgcctcttagtgtaaaaatatctccttggaaacactaaactattcaaccagagagaacgacactaaactaaattagagatagtaatacaaaacatatgatctgcatttcaatacaaaaaccaaactttagaaacccccaaaataggtggagtctgtaaactcatgacacccatacatgatttcttctaaccgtgacacagaattgacgaacaagattatagcagatctaacaccatgagatccaactcgataaattcgattaccacatagaacggttacttcataaacgttggagaaagtcgtgtt

SEQ ID NO: 28986 - DNA, 517 bp, Arabidopsis thaliana columbia
tatcaaacaatttttcacgaaaatatttcccataaaaatagtaattagtgacgttgaatcaaatttgtctctcatttccctcacgtatacacttgtaaacattttatataacgccacacaattcacactctaaaacatcatatataatgccacacatggcatatattcatatacttgcattgaataagtgcactttatttttagactgggaactctttaccatagcaaaaactttatcgtttcagtggttacaaatcacatacataaatcacattcatggttgtaaaaccggtatcactaattatctcttatctaatttgctacctatcaatgattttattcaatatcgaatcctgccaaattgtctaacacttaaacataagtatatagattggaccctaaaaacaaggaaaaatatattttgaacgaaaagttaaatataaatctgaaaaatacgaagcagatacaagaaaggaaaaaatggaacgaaaatatataaatcaaaattagtataaat

SEQ ID NO: 28987 - DNA, 557 bp, Arabidopsis thaliana columbia
gctcaaacctgagacacacaaaaaaggcatttcgtgtataaaggacacaagcgtggaagccaaaagcatgtcacaaactacaaactttgtaaactttgaagaaaaaaaaaaaaggctttttctatatacccctgttcaaattttaatattgttataattcccccgatccaaattaattcatgggtgctgttcttataaaatatgtacacatcataattctcgagtcataattctttttctatatatatcccgcggatgctattaatctggataagaaacataagactctgactccttaacacattatgatgtgatgattacacatttgctggattgatgattactcggtcgtatggaattatatatttcacagagtagaatggaataaaagacaaaccctgccaaaatccatattgtacagattgagggagcttatctacgtggaaattatggtttcttactttatgatcatgtatctgaaaatacaaagaaagaaaaagagagaattaagtggtaagacaattaatggtgagagcggtaagagccgataagaagga

SEQ ID NO: 28988 - DNA, 548 bp, Arabidopsis thaliana columbia
ttttggcaatgcgattgttatgtcttcatgtgtatatcacctcaacactggataagagtttgaaccaaagatggatatatcaaatatctagttttccatctatgtgttctcttttctaccattgatcaagtccacgagttattgatgaaagcctttttccactatggtccatctaaaaccgcagattcacaatgtatgcaaagagtgaaggaagctaaaaccttaggctaaagcttttgtttactattaagatgctgccattacataagggtgccgtaatggttccgaataatccatctcgatctagttctctcactttggtcgatcgcaaaagcttgcatcatggttgcatttgagccatccaaacggaggaggtatctacttggttccattaatcggtgttgttatttccacggatatttttgcattaaacgtctaccttaaaggcttaaacgtacatagaaaaatctgcaccgatcacatttcactaaaatatttttctgtcaaatcacatgttggatggtgtactggtaagttattaaagaggg

SEQ ID NO: 28989 - DNA, 554 bp, Arabidopsis thaliana columbia
aagaaacttacgtccaaaataagccaagaagaaaccttaataaaaagattattgactatgttacatgccaaaataatcttaacacaaacttgtttgatcatcattttaggtggcttttaacaagaacttaaaacaaaaagcataaaccaagattacaataattacagattcgaattctttcaaatcaaaaggtttaagaaattagtctccatagagagcatacgagcatcctaataattttattagacaaaaagcttaaccatttaatattcttcttcttcttcctgcttctccaatcctgcaaccaaaagtagaagaccattggattcttcagttcaaatcaaaatggcgcaagaccaaagccagaccagatcataattgacaagttctttaactgaagtcaacaaaagagatcatgcctctgcagtattttcttgacgagtttctaccctaaaccttttacacgtttctcggattatgtagtgtacgtagttttggaccagcacattactatataagctatataaggagacctgtgtcaactgaagaagatt

SEQ ID NO: 28990 - DNA, 467 bp, Arabidopsis thaliana columbia
ttgctttggaataagataatggatcatcaatggcgcatgaggttttcgttcaagaacgcaacaattgctctcactgtcatcaacgttctcatcttcctcttcctccttcagggctttttcacttcctcctcttctccatcttcttcttcttcttctcgccgactcatttcaggtctgtaacttttctgaattccttgtgggtatatcctgattttgcgtaatttctctggatttcatcggaatttgagcaaagtttggtgctttagggatcatcttctgatgggtctttctcggatctgctcataacaaaaagcttgttgactcgtttttagatttctggatcctgtggtcacttcaattcgatctttgtagatttagggcttctacactgatatgattcgatttcgaaaaagtttagatttttgcgtattgaacagataattcaattgcataaggcacttgaaagt

SEQ ID NO: 28991 - DNA, 987 bp, Arabidopsis thaliana
cacctccaagaacgtccaaagttcccacatggcaggcttgtcataccatcgaaaggcgacttattactgtttatgttcattgactcatcaacaaatctcataatggacggacttgttagcctccccaaatctgtcttctcggccaaacttctcagatatttcgcatacaatctacaagaaacatactttctaagagttgcaaaaagggaaagaagcaccagataaatcagaaagaatagcaaaacacaatgaactagaccttgttttactgcttagacctatcatccgaagagtttcctcagtgctaatgccatcataaattataacgtcaaaaggcttccccttgtgattctttcgggttgcttgcctaaagaaaccaacaagcctctcgagttcaagcattgaaaagatggaatccatccctggaagtactcctagctcttctccaaccacctactacacaacaatagccaaaacaaattaggacttaaaattccaaacctttttttatcaaaactcacagatacgaagttgtgtcacatacccaccccttcaagaaccccttgggtcatattaagtcgagcatctgcttgcttcagctgtttaagaggttctagaagcatctgcaatgtttccagaaaccattgttaagtaagttcaaaacttgaaccagacctaaagtatacaaagatcgaaacaaacaaataagggacatacttttgtggtttctagcctaatgacagagagattgtcgttgatcaaggtaggagaagtcccaatcttgcttccaaggaggaattcagcagaagggtcttgattatgtatcaccaaacatgtactgagcccagccaatgcgtaatgctaacgtacatagccatttttaaagacaaatagttagcaaccacacattcaatctatgaagacagcaaaaagagacatcaatctaagcagagatgagatcaatacaacactcaattctaaacatta

SEQ ID NO: 28992 - DNA, 579 bp, Arabidopsis thaliana columbia
atccatctttatatcagaaactttaatacacatttttattataacaatcaattatataaggaaagatccaaacaaattctatatcatgcattggataagtcgccgaagtgggtgtgggactcaaattaaggtccggtaagcagatatatgtgtggctcctacaattagtcggcagattctgcggacgttcattctaactattttctcacgcacttcattatcgcgtgtcactcaccgacaaaacatagaccacgtgatctcaccgcctcgcgcttaagttcatacaattttggccattgcctgaaacagcagctccaaccatgtctcaccgcgtgttggtctgctcacgagccttgcgtgcgtcgttgtcttaatgctttgattttagtattttattaagtaactatcaagtcaaggcattaagtcattttcgtaattcactgacggttacaaacttacgacatttaacaacaatcttgagcattcacacttgaccttttttggaacttttcaccattgacttttcgtagttcgacaatgcatgcatggacatacaaaagccttgaatgcgaagaagga

SEQ ID NO: 28993 - DNA, 660 bp, Arabidopsis thaliana columbia
gattgtggaagctccttagtccaatggttaaataaaaatttattaatatttctacattaagaggtttgaggttccatatatgttagtaattttttgtaaaaaatgttgtatataacgtaaagttgaaatttaatgaataattttgccgtataaaaatacattatttgagtccagcaagcctagcgaaaacaggtggtagtgggtaaaaaagaaggttgtattcgttgcagagagatacagtatgtacacttaaattacatatatgcactaatttacctaggctttaaaattcacaaagtggaaaaaaaactttaatttatcaaaatgagattctctgaagtttgtgtgatgtcaaatcgattaaaagagattctgtaaaacactgcgttttactgtgtctatccaatttttacagtattgatactgaagggggatttacgtcagttaattttaaattgagagatttttttgactaaattaaccttttatatttggctatttgccaagcccagcttacttagcccattaaaatcacatcgattagtctaaccggatcctggcccattagattgtccatcaatccgatccgacccgacttgcaagtaagttagaaaatgtgtagcttctccgtcctcttcttcgttacgtcgaaaaaaataa

SEQ ID NO: 28994 - DNA, 532 bp, Arabidopsis thaliana columbia
gagaacttttatgggaaacccagctgagatcgaggacaaagtttgtgacatggaaagggaacaacgccggcgaggttagtgaaagcaagaaacggcgaaagggtttttggtttggttcgaagatttaggagaatttgcggtggattcaataagggatgactataccgaactcggttcggttctttaggtatcggtacactccggttttaggttctgctgttcatttaatttgctagatattcatttccttagaaaagattaactatgattaatatttctacatttaggaactgaaagcattattacaactatccaaagctatgaacatgtaaaggtggaaagaggacaaagaatataacacgtttaggcaaattgtgtattacaactctgaaggtgtttctcaatccaaaatctctccgtttcttcggttcaatacggagtttctaattgaactccgaaaaagcatggagagacagaacaaacatagtcctgttgtcacagaagaattaacagtgtcagaaaaagtacctac

SEQ ID NO: 28995 - DNA, 449 bp, Arabidopsis thaliana columbia
attccgttggtgtcggcatggtgacttacaaggagccacataacatagttctaactccctagagttaaaatcatcttattttgataggagaaaatatgttaccatcgatttgtaacttgaagataatatatcatccatattcagcctatgtttcgacaccaactatttaacagcccttaaaacaacattttaagtccaaaagaacagagaataataagatcaattacaagaacacaaagtcattgtcattccactatagtcttagccaaacttaacaattctaagacccactcctttctcatatgtaaaatggaaagattctcctcgtgtaacccaaattcaaagactgagaagaccaattcttaggatccttatttgcagtataaattcaataacacagcggatgcttccttcttccttttttgtataaattttaatgatataccata

SEQ ID NO: 28996 - DNA, 402 bp, Arabidopsis thaliana columbia
gacctggttatgatcataatgattctccagaaaaaaaatatctctcttagtttttctcttgttctacagagtacgatgttcgtgaaacggaatccgattagagaaaccaccgccgggaaaatctcttcgccgtcgtcaccgactttgaatggtaaactactgaagctatagtttcttcgtttttgttgattttctcgcttctcttctaatttctgaatttttggtttgggtttgttcttacagttgcagtcgcgcatataagagctggatcttattacgagatcgatgcttcgattcttcctcagagatcgccggaaaaccttaaatcgattaaatccggcaggtattcactcgattctctgcttttttcaccttttattatagacagatctcgttttttgt

SEQ ID NO: 28997 - DNA, 436 bp, Arabidopsis thaliana columbia
caaaaaggttgataaaacgttcaaagcatgtctagatgatgtaaatagtttattaaactgatttgcaagtgtaatactagttttaaagcgtatgataaatgtagaattatattcaccaaaaaaaattgtacgaacttttttctttgatttattctattattattttctcttcactttgctaggttatgtggttttaaaataaaaaataaaaaatagtttcttatgaactagttatgggatcctaatgtatataggttaccagaatgggattttggttaactatttaatatttatcttggataaacaatgggattagactcagaaattaaataatttcaaatagacagagaacacaatttggttgtcaattatgttgaacgaagcaattcatgctttttcatttctttattttctcaatacattattaaggctacat

SEQ ID NO: 28998 - DNA, 515 bp, Arabidopsis thaliana columbia
tgaaatatgtcaaatatcaaatgttgcaaaaatatatgagcaaatgttcaatttaaatcacgactatgaatttatagctagctcgggatactaaataaagtcaacgtgtgaacatgtgaagccggtttgtcatatgcatgtcatgcgacccgttcgagtttactcggcccggtggaaagagaacataatttttcttcttctttaattttcagaaaaaaaaaatatatttcttccgtattatattgtttactagtttagattataatttttagtaatttcttaatttgctctaatataattcccctatttcctttcatttagtgagttgtttctaaaggtccaacccaaattaataaattaaactgccgccaaaaagttgaaaagctagtaagttaataaacaataacagtagtacattatatagtttatgctctctgattgtataacactatttaggctgttaatgataatcaaaccgcacccaaaaccgtactgcaacagtgttgtacaatatt

SEQ ID NO: 28999 - DNA, 339 bp, Arabidopsis thaliana columbia
ttgtaaccattgtcttttgtatatatatcgtgttagattttttctacagcttgacatatttcacatttagtagcaactaacacgtgaagaggttgaccaaagataaaacaacgaaaaaagttcgttgtcgcccattttaacatataaaatgagtaatatttatagcaccaaaattagtctttttaaggattaaaatttattttctacgggtactattgctagttgctacgtttaaaccataatctgattgagtctgatcaaatcggtatggttcatcgtgattgtagaaaccttgtgcttgctcaaatacaaggactggtacaattgcgcaatgtgttg

SEQ ID NO: 29000 - DNA, 501 bp, Arabidopsis thaliana columbia
ctgatccccggagtgacagagagcaaataaacgagataaggttaatgagaaatatataacttgtggaaaattcaaaaactttggtgtacgttacgaaaattctcatataggcaaagttatttaagtttcgtaatatacaataaaaaaaaaaaaaaagtagaaaaatatttgaaccgcgtgggtaatgtattgaccacagactcaagtcccttcggtatcatgtgagaaggtaacatgggtcccgcctgcagtttttcctattcttttctttaatttcgaaatttttgtaattaatgtgaatgatacttttttttttagtcttagtattattgccatcatcatactagaaaacattgactaacgaactctaaatcgagttaatggttgtcatatcacattgagactgaaaaataacaggaaaataaataacaatgttcttaccccatttgcttattggctctcttaaacaagcaaatcttaaaaagcttgagtagaggatat

SEQ ID NO: 29001 - DNA, 531 bp, Arabidopsis thaliana columbia
atataaataattaaaaattgtaaaagaataatctacttaaactattagcttatccactatactatttcttttaacagaacgaaccgatttagtatcaagtttgtagcatcaagcttcaagaatcctaaattgcattgaggatcgtttctcaatgcctttaaaaacagagtaataatcatgaacaaacaaaaagacctaagaaaaacagagcaaacagatttagtatcaagttggtagcatcaagctttacgtttttctaagaggaaagacgttcgacttttttgagtagaccttcgttctcgacttctttgagtagaccttcgtattctttcaggaatagacactccattcaacaggtgtaaaagatccccggtaataatcccatgcctagtggctagccaatccacacacgcttcttcttttgtttcagcccaaacaacgattttcaaggtaggagaaaccattgatccagcaggtccaagctcggtagtgtaagctctactcattccatgtcgacgttgtagaacatac

SEQ ID NO: 29002 - DNA, 606 bp, Arabidopsis thaliana columbia
tctgaaaaaacgtccttcacaatcttgattgctgaaaagcttcaaaaattccttattgtgctccatagctcccagatgtgtaaatgactcaaaacatacgaaaaagactagaaagactctaaaaaccattcaaaaactatgttagaaatcagtaaaaaccaggacatatcaactcccccagacttagcttttgcttgccctcaagcaaaacaaaaggttgaatctgtgaaagaggtttgaaaaacatagaaaatcccaatctctctagcttattagcttgatcatacaaaccaaatccatgcactaaacagttctaatcaattcctgaccaccatgtaattctccgctagcccacacaacattctagattccataccaaagcactcaactatatccactaggctatcatcgctgggtctcatcaatcaagtaaatgcttaagaaccttctagactcattcatgtactataccatgataaatagaccattctttatatatatatagcctcatgtgttgtttctctcccccagacttattctttttagagagtaagtttgttggtttgctttctagattcaattagtcggattgatttgaatctgtag

SEQ ID NO: 29003 - DNA, 559 bp, Arabidopsis thaliana columbia
tgtaattacacaagtgctcaaaacgtatgagtaattttaaaaaaatgtatgatattttagtaataaacatacttttctataacatctaagtaattaattcatgtaacaatgaattgacaacgacacaaaattgatagttaggtttttgaggcctaactattgtgtgttcaattttcctttaaacactaacatgtcgatgcagcaatagggggtgtcaatccatttcattctgattgctaggtggtcaagatgtgtacaaaagcaactaattcaagccaaaatacaatgatggtgggtttctagtaacagtcttaactcaagtttcaaacaataaaaaatacaaactaaagtgccctactcgatcacagggttgagtagaaccatgaaggcaacatattcaagtactaaaatgcaataacagataaatgaacaagttaaaggaaaatacacaaataaattaaagaagaatagaagtcctaaggacggattcatggataagggcaaactgtgagatctataaggtggctacaggcgaaagacaaataccctaaagaaaatg

SEQ ID NO: 29004 - DNA, 858 bp, Arabidopsis thaliana columbia
tattgttgttgtatgtatccatgatagtgaaaagattaggatcttaggtctataaataatcagatcagatatatatatgagaaaagtataattgatggttcgagttaaagatgaatctaaccattacaattataactatatatatatataaataacacaaataaaaacatatcaaaatcaaatcaaagaactaagaatcttgaacaacaaccaaaaagctattcaagctcattggtttttcttatatactaatatagctgaacttttaaaaaataattacaagtcataattatgtttcaaaaataatgcatttaaatttatttatatgaaaagatattatataaaatagtaacacataaacccgcactacgtcgtaacttcatctagttaacaatgaaaaacacttagctttttctatagcttcaaatgtaaacgtttgaatatctctcaaagagataattgcatgttctgcatctttagttgaagcttcattatctgcttctatgtggttgtttagaaactctggtgacactgaaatctgcaaaaattcaatagatcaaagaatcattcactataagcttttcgagtaagaagtaaagttcaatagaagcaaaattcaatagaagcaaagaatcattcactccaaaccaacagacactgaattctgattaaaagatatttatattaatcaaccaccaaccctaacctagtctcaggagtcctaaccctaaattccgatcacataaaatccatagatccattcaattttacagcgaatctcctcaacgaaaacgacaactagatgaattgagctgattaagacaaaattgatttgagagaaaacgtcgtgctgaaaaa

SEQ ID NO: 29005 - DNA, 604 bp, Arabidopsis thaliana columbia
aaatgaagtgtggacttttggtgtgacttgaatgtattatttgatgactggaaaaacttacttgtctaggagtcaacgatgtgtcagaaaatgtttgacttcaagcattatggtttcagtttcagagtctcgacctgtgtaggtagtagaagttatatcccgctgctatcatcattccgctggtaagaattcccaaatatacagaaacgcatgagctctaataagagcgcctaatagaggcttgacatacaaccggagtgacgatccgactcaaaacagtgcacatgtatactctcatctcatctgatgagataaagttatctttcaattatgaatctctggttttatttcaccatgtaataatacacacaaattgcattatagaatagagaagaaaaagaatgttttagtacaagaacaataaatgtgggggttcaaactttcaccgatagataaacagtctagaagaatttaagtttccctttggagagagcttgaacaagttgtaattgacacattgccttgtctttcccggtcaagccatagcaggacgagtgcctagcgcctaaagtgactgcaaagtaaagatagacagtacagagga

SEQ ID NO: 29006 - DNA, 555 bp, Arabidopsis thaliana columbia
cattataacattgttgctcatctcttggctaaacattctctagatgtaatctcgctagtttctattctgctagttctaattctagttggtgatggctgaacaattctacgactaatgatttactcaattgttaataatttttttttttgataaaattgggtaagtctaaaccttttttttaataaataatatctcctatatatcttataggaaatttgatgattatcaaaacataaaattttaaacaaaaaatcaatcgagattgtatatcaatttattcacgatgttccctcaccgtctccataatttagcaattaggttaacatccaatctttctctcctctctaaagcaattcacaacaaaaagagatagagagatagaacaaaaataagacttgcttcccaaaccaattattcctacaccgtgtcagaaatagtgaacggctatccaatggaaacgtcctcggccattcctcctcctcctcctcgtgttggatggtggtcacgccaatagtgaccgtgccgttaagtaatgatcgtgaaccacttgcaagg

SEQ ID NO: 29007 - DNA, 359 bp, Arabidopsis thaliana columbia
gtctaaacgtgtgttcatgttcgagaaaggttctttgtgctgaattccttgtctaatatttccagtaagcattgatcgctgaaataccgtatggctcaatgcattttcttatatcacttgaatcggtcaatttcatgcattttaattcattctcgagcggaccagaccggcatccggttcgctacagtcacgatcgagtctcgggactctcgagcgtatctatggaccttgtagattgaccttgggtatactacctcgcagcaaagcgtatcgggcaaggactcgagtaacctcagttggcgccgttgtcggggacacattgcgtgagctccagatctaggattaggttgtagtccaaa

SEQ ID NO: 29008 - DNA, 209 bp, Arabidopsis thaliana columbia
  unsure (1)..(209): unsure at all n locations
gtgtgctgtaaaggttgattaagtaaggtttggtgagagttaacggataagtggtgagtgaagtaggaactagtatcaagtaaggagacaaggtagaagttcaaggttaaagtatatacaaggaagaacaggtatattatctggttacagcaaaaacgaggtgtcatttncagtgtcagagatgacaagggtcggaagacgcgttgtgg

SEQ ID NO: 29009 - DNA, 502 bp, Arabidopsis thaliana columbia
catctagagcgtaacgtacgtaacgtataaacaaaattaatggatgtgtatgagatgaataatgaaatgacggaataataataatcataaattgatataaatatttgggctgaacatagtttttgttcaattatcacgaaattttaaaaacttttttgcaaattttattttcctaattagatacatttttttatcatgatgtacctacatctttttaaaaatattttttcagaaaacatcagattttgataaatattatgaatgataacataatcaaattagaacataaaaatgtggtaaatatatttgtatccctaatctttaccaaaaattaattaaagcaagaacatacatatacaaatatttaaacgtttttaaaactcactaggtttaaatcgatgatcattgattagtcactttcatgtttcttttgccttttggtctacattttttttaactccataaaggggagaggtgggttgaccagttacatgtgactagg

SEQ ID NO: 29010 - DNA, 158 bp, Arabidopsis thaliana columbia
ccgtcacgatggaccccttagcggtgtattccacgttggtgacgtcatgcccggcggcacggataacgccctcctcgtgaccagctcgacgcaggccgatggtagtcgtaaaggtgtccatcatgacccgtcggtggaaggcagccactgttagagcg

SEQ ID NO: 29011 - DNA, 712 bp, Arabidopsis thaliana columbia
aactcatgcaatcaaaagttcaattctcataatatataagcggaggtaaaattcgtatattttcaaagtattagatgatttgtttgtgaaacaacattaacttatgtccattgttctacatatgaataaaaatataatatttttggttcaccacttttgcgtttaaaattaaacagactattaagatcacaaaaagactattttgtctacaatcaaaaatattttatttgatgacttcaaaataggtagtgccatagacaattacacttacatactttttttaccctacttaagggatgctatgtagaactttgagttacataaatatgtagatcaagtgtgcgtttcaatctagtctaaacagaactattaagatcacaaattttgatttttttctatctgtatttttttttaaatgtcttacaaatatattgttgattaaaagaaaaacattttatctcagtggagtggtgatcaataatacaagtacaatttatcgttcattttagagctttttaaaaatattcataagctcgtgttaaacactagatctagcaaatacaaattaatatttgcttgatttttcaacaacacaaaatataaataatgaacatgcattgcaacttttgattaataatcagaatttatttattagtagtttaccacatccgaatcgaaacatgaaagaaaaatacaaaatttattgattttt

SEQ ID NO: 29012 - DNA, 335 bp, Arabidopsis thaliana columbia
tactacattagtcccttttggctattttaattagtagaagaaaataagacttctctttctgtctatattcattgatatgtcgatcttagtcattatctttgtaaattatgtcagaaccagacctacatatattcgtgtatgtataattgaaatgctaatccctaagtaggttaagtattattaccgaaaatcttatcgatgactcagctaagaagagtatgcggttggcgacagcaaatgctagatgtcagtcacacgtgcaattccatctgacgcacgcgtgaagtttttctcttataagtccgtttcatttgttgaagtctgaatatatatat

SEQ ID NO: 29013 - DNA, 461 bp, Arabidopsis thaliana columbia
caattttgagaaaaggaaaaaaaacaactccaataatactttttgattttcttttcgttgcattaaaataaatgtggcaaaaatccaataatattactattataagtcaccccccctcaaaaaacaaaaaaagtatattccgtaaattttttctcagtcaggttcaatcatctccataatcgttgatatgtctctctgggtaaatgttatatctataaagcagagagtttaatagagagtgaaaaatggattttgtgaattagtaacaatgaagtgttttaattgttaatgtatggatatgtgtatatttttattgaaagattacatgaaattatagatataattagatataacctgtgttatgtgtatatatttcggatatagttataagaagtgtttgaatgtggattttggatgtatgaaacagtttttaaagaaggattggagatggtggttatttg

SEQ ID NO: 29014 - DNA, 470 bp, Arabidopsis thaliana columbia
tattttattacagttaatttaagcatattccttgataacaaacactgttttacgacagaagcaaaatcctaatctctaattaattaatcctatgatcatacgatgcatgtttacggtcccgtttttttaagaatacacgatctctagcagaaaaaaatctcacaaagtttatgttaacttcaaattctgtgaacttccgcacatgaatctaaagaccaccctttatagaaaaaatggtcccgagactatcaaacgtagtctttataatgtcaaagtagtgtgaatctcatttttcaaacatttttaatgttatgaattgatcatctgattttcgtattaggattggtcattcaaatacggtatgattactcatccatcaagtagtaatttaacgaggcatcaatatactatatagaatcaaagcaaatattccgaaactaacatcggaactaatgggagactggatgtga

SEQ ID NO: 29015 - DNA, 453 bp, Arabidopsis thaliana columbia
atctctattactatacgtcatgagtgccttttatggacttcacaccaattttaatctctctttttttaggcctctcccaccaatcataactctaatcatttgtattatattaagtaatcccactcctatgttatgatcctcccaggagtggaccaaatatatgtaccgttaaatcaaaatgcttctgagagtttaagatttggttgaaccaagtcagcccaaaagaaaagaaactgtttctgtcataaataaatatcctagaaaaagcagagtgacgtggatttggttctgctgagcataagaattttaacaaaagggtactactacaatagggaaatttactgcaggtccaagcaaagactgtagcagtgttgggccatgaataagacctgacctttgaagattagccataaagagcacgccacggacttgcttcgtcgtttgatgtctttg

SEQ ID NO: 29016 - DNA, 490 bp, Arabidopsis thaliana columbia
taacagtaaagacaaaatgtgcaggagaagtgaattgatatgattaagacacccaaaagcatgactgcagaagaagatcaggcaagtggatcctcctctctagctttccgtagcagctctgctctaactcgccttacctccgcttccttctccattctttcttgctacacgtagttacagttatgtagtcagattaccactttaattttcatattctataaaactaaatgaaacaaaacaaacacaagttaggcttagcttagcttctaatcatcacttcttaacaagaagtcaaatcatgctaaagcttttcgaataactagtaatgatgataagaggctctatttgtgctttcatatatcaacattaaaccaagcaatcaaacaaaagttaagcttaagcctctaatcatcttatcttcataatatgactgtcaaagtttgtaatcagatagaccaaagaaattgtttatctacataatccaacattg

SEQ ID NO: 29017 - DNA, 399 bp, Arabidopsis thaliana columbia
  unsure (1)..(399): unsure at all n locations
ctcacaagcagtcttcatatctcattgctctcgaaccacaacccggtggaaagtccctcacagcgaaagccatccagttaactgatgaattagaaagttgcagcatcattgggaccagttttgcatttacggccaagagctacccacactaccaccactacgattttcatgtactgctagtattgatttattagtagtttaatacagctcatttagtcacttgttaaaaaatattatactaatcttagtatgttaatctacacttaacgtgccttcaatacaataaaatgaatataattggantccaaaaattagagaaatggacccagtggctattaacttctcacactggagagagagtgacatcaaactactaaccaattttattttatttttttt

SEQ ID NO: 29018 - DNA, 174 bp, Arabidopsis thaliana columbia
tagtattatttatttcgtgtatagaaaaaaggagttattgttcctatactatgtgtccccataattcatttataataatgaaaaagagatttattttaaagaaaaatgtgacaactttgttagaataatagatcgataacaacaagtccaggctggggttttattgtttgtttc

SEQ ID NO: 29019 - DNA, 599 bp, Arabidopsis thaliana
tctgaagatttgctgtgtctgtgtctatgacgcgaacgactgtgatactcatcatctgaggagctctcatgcttgtgcttgtcccgagaatgtctgtccttggaagagtatcgtgtcttatgtttatgccgttttctactacatgaatgcttcttatcagtcttggtttcttctgtaacttcgtccatgctgctctcttcctcttctccttgttccatcttaccatcttcatctctctgtgatctcgaacggtaattcctctttgatcgtctttcactgttaccatcatccgctagttttgactcagctacatatggaatcgagctactgtctctttctttggcagccttagcacctaatccagaaatcccagagtccaacggttcgactgatatgcttcgcgacggttcagcttgttgaactggctgcgcatcaggttttaacttggccacaaacatttttgcacgtttcaatctttctgccttcaacttctgctctttagacaagcctgcttcagaagaatcagcttcactagcagctgtcgagccagagagtgattgacctgtagatttggccaaatcaggggacttagatgaagg

SEQ ID NO: 29020 - DNA, 729 bp, Arabidopsis thaliana columbia
tgtatagattatgagacggtgaaattttagaaaatttatttcttacactaaaaatataacatgtctttattaaccatgtctctgcatattcaatctaagcatattcaacttgatattcttagaaagtttagttaagttcttgtcataatcttatattttacgtattagttataaggatagtttttcaaacatctttcaaattacttgttttcttagcataaatctcgaaaagcttatatatatttaatctgcatattcatttagtttttttcataataatcgtctaatttttagacaagaaatatgtgtaacatgtttggattttatcatcactttaaccacttaagtggatctcaaaattaaagaggatatattgaattaaaaaatgtaaaaagagtgatggttcaagttctcattaattatatcctcctattttagttgttatgttgaattaattactaattatgtattacttattttatgaagtctaggtggcaagctcctcatgtgctgatttgtcaagttgtggaagagagttagctttctttcatatatatatgattgttatacatgttttaacatcattttacaactaactttctttaaatgaaattttaaaacttaagtatagtatgattaggtattcagatgcatggtctcacttttttgtgaagcgaaatgatttggccgtaacctttatgaacaaaactacaataaggcatgagtcga

SEQ ID NO: 29021 - DNA, 488 bp, Arabidopsis thaliana columbia
atcacacacaaatcttgcggctttgcctctctatacaaatcactcttctctctcccaatcactccctgcaaattttcttctctccctctcccatggtggttcctctatttcaatcatgccctctcaccccaacttcatcttcaggtttttataccacacaattcccattttttttcatatctatattcgttcattaatggtgctttcacgctaaaacactcccgaattctgaatatgtattttgtgtcttttgctgtttacccagaggttacaagctttacctgagattgattatttttccccgagaaacacttttcccggaaaattcactcgttttttgaactgttctatagctaacaagtcaccatgcaattccttataatctcgcttgagtatgcgaaatcgttcatctagcaacgaaatcgattttcataattgtgtactatataacgaatgtgagatgattctgaatgatttttggcgataga

SEQ ID NO: 29022 - DNA, 525 bp, Arabidopsis thaliana columbia
ttctatgaggtagcgacattaacgaccacaaggaatttttcttgacaaacgctcaatgaaccaaataatgaactatgtaagcaaaatgcatatcttaatggaagataaaatgagacagttactaaggatagaaaaataaggaagcaaactagcacacaatgaaataagagagcaaacaagtaagcaaggaatcaaggaagcaagcaaggacacaaggaacgaagcaaacacacaatgaagtaaaaagataaaccaaggacactggaaattaagcaagcaattcatgaaggcagaaaaacaagtaagcaacgaatcagacaaagaatcaaggaagcaaagaagtaaacaacaaatcaaagacagagaagcaattatgactctgtacaaggaagtatgcaagaatacttatgtgtgtatgcatagatgaatgagtgtatgtgtgtatgaatgcatgtaacaagtacataagcaaagaattaaagaagaaaaataaggatacaaataagcacacgctaggaactgacg

SEQ ID NO: 29023 - DNA, 585 bp, Arabidopsis thaliana columbia
gtctctttagttatattatctaaacgatgtcgtataattcttacgccgagatgagttatcttctgaagacgttaacgacgaaggaagagattgatcgggttatcagagacaccattgatgaagttcttgttttacgatttggtcgttcctccgacgccgtttgtcttcagcatgatgaaatcgtattcaattcgtctctctttgaattcgatttctctaatttcgattaatcaaaacccctaaagttttcgaatttttcttttcagcttgcgaaatcggtgagagatgtttcgaaatttgctaaggtagctttggttgatgttgattcagaggatgttcaagtgtatgtgaagtattttgatatcacgttgtttccttcgacgatcttcttcttcaatgcgcatcatatgaaattggattctgggtaattaattaatctcttgttctagtagctgattaaagccggtttaggttggtttatgttaattccggtttggttatattgtagaactgcggatcatactaaatgggttggtgcatttcatataaacaagactttattgatgttgttgaggtacaagacaa

SEQ ID NO: 29024 - DNA, 553 bp, Arabidopsis thaliana columbia
cgaaatctctaaactactctcattgggtcaatttttagaatattttgtcctttatttttcccatattgtcaagttttataggtttatgtttcaaaatggtttgacttattgttaatgtaaaaaatttccaatgcatgtttgttgatataagattggatgaaactgatcgcagtggttttgaaaatctttgaatgcggaaattaagatgtatacacaagtaaaagttgcacaaagatcaaatctacaacaatgatggcaatatggatagtgtgcacctatctagttttagattccataaacaaaagtgtgtgcctcaaatccaagataattctttcaccatccaaaaaataacaaaattagttgtcacgtacgaatttttcaaacgaaagacttttccaaatatcatgtttatataatgttaataccaaataaaaaaatgttataaatattgttcatatgaaaattcatagagttaatccaataagatattccgactagcgcgtgtgtggaaaagacgggagtgaggaagcgcgcgtggaggcgcgtaggggat

SEQ ID NO: 29025 - DNA, 552 bp, Arabidopsis thaliana columbia
cctatactttattaatgtatcgcatgtatagattcttggtagcaaatctgaaatcaacggtgacatgagaaatggtcgccttgaatcccctatgttttaaagacttatttctactttgagtatgactgaatacaaaaccggtttcaatcttgaattgtgttttctatacggcgtcaaaagttgtaggatccatctactgttagcagatgggggaaatatatgatgtttcttgatagcaagaaggtaacggatgtcttgtattttgcaggctcttcaggcttcaggagacatctggatgtcttatcaaattcacgagaggtcattgcgtacccaaatgatttaaagagtgagaatcctattccgttttggattattttaattgatgtcaaggattcaaggaaataattagatgagaacctttacatagaaatctcttcatctcatttagaagttacaaatccgtccacatttttttctaccatcccacggccatttttgtttgttgatagaaattgttttaatcgtcttcaacctatacattatgtacaatag

SEQ ID NO: 29026 - DNA, 543 bp, Arabidopsis thaliana columbia
ctatgacataggcaaaatacaaaaaaaatgtagatataatttttcagttttttattaatagatataaactgtagatagaaatctatttttacgtaaagaaaaaaatgatgagaggggttcaagatatttcaaaatccactagaaaatgaaatgagaaagataaacttgaagatgaaaggaggaggcatgcattttcgtaaaatggccatccaatataattcttaaaccattttgtgaattagtaaccattcgttccacctaatttatcttatatctaattggtttggtcaaatgtgatttttgtctagggtaaaatatgaaaaaataacaaagctagttggcttgatcagttagatgtaaacttatgtacgttatgtatgatacaatatgattttgtacggtagaaaagtatcaaaatgtaaacgtcaaacccacccaaactcacgtcacttacgtctataaattaatctttgtctcccaaccaaagaaaactagagacaagccgaaaacaaaaagaaaaatatgtacatggcaatcatgatt

SEQ ID NO: 29027 - DNA, 463 bp, Arabidopsis thaliana columbia
atgcatgatcatgataaaattaaacggaattgaagtgtgtatcatataataaggagattttatatactataatttacaaataattaatcatctaaaccaataacaatcatgaaaatcattattgatttatggcacgtagagaaatcagggaataaaagccagctagtttttccgattttaattaaggtacattttcttcattattcataggtgctcaatcattcatgtctgtctcttcatggtggttagtaccattttacaacatgattaaattcatatttacattaatttatgtattacatcttctaatatcatgaagtatgtacggaatacaacctactaaccccttcaagattatagaactctcgtatagtactcgaatggcgaagtaagtatctaatcatgtgatgaacttggagcaactaaactcttagcataagtaattatgtaaaaaactaattta

SEQ ID NO: 29028 - DNA, 176 bp, Arabidopsis thaliana columbia
tggaatgacacatgggttggctacgacgagcagttctggttagtatatatatttgcaattaaatcatgtgacttcattatcccactactgatctaagtacttgagttttatatataggtatgctgctttgctcggtgcgtctcttggatgtgacttgtgtacattcgtcttctctg

SEQ ID NO: 29029 - DNA, 545 bp, Arabidopsis thaliana columbia
agggatgtattaaatcttccgtgcgccttaccgcatatgaataaaccatttgaccacaaagacaaatgcaaaagaactaaaagagtctggtttctgttctgtcctaatttctctctggcgaaactaagaggtttcggttacggtctccatctccgatcaaatcacgaagtttctatcggaaattttcagtgatacataccgtcagagattttctttacgagagaattgtcgccgacatactaaagcagagttttgggtgggaattaggtaaatatcttattggttttgttctgtgccgatatgcagatttgtgttcttcgtttgaatccttcatctattcttgaaccattcgatttaagtttttgacggcgaagattaaacaactcttatctatctcttttttgtccttttttgcgccggaagggtaaagtggtctttgtgagatagacgctgacctggtcttaagtgttgacaaatgacgcatttactcttcgactttataaagagttccaagggtattttagtcataaatgagaaataatttt

SEQ ID NO: 29030 - DNA, 534 bp, Arabidopsis thaliana columbia
taacccataagactagagcggctcttatgataagactatatcacatcatatataatttttttgtttgatagagactgtctttagtttgcaaaataggcccatagtttgttgggaactaactaaagtaaacgctgcgaccaaggtggaaagtttgttggtatcactgggtcaggaatcgatatgtcagaatcatgtaaaatggacatgagtggttgcaacttgcatggagtggcaactggcaagccattttaatacaaaatttcttttgattttggtccagcaagattcatatttattgtgtttaatacaaaactgaaaacacgaacaaaagttatataacataattccataatcccaaatgattgaaatggggcagtgaaatagcattaagaaacacgattcaactattacaggattacatgtgagacaagaccttattgttgacactacaagtgctgtagtgcattgtaacataagaaagtaaactggggaaagctaaaacgatttcttttcgtaagacaccagtccatggat

SEQ ID NO: 29031 - DNA, 679 bp, Arabidopsis thaliana columbia
cgtttccaagatcacatatcagcagcagaagcttggggaaaatcctgatgaaggtgagagtagttccggggttagaggtggcccaacaacaccaaagacgaatactcctacaccacctagccttgtagatggtgtcgctggagatgaagaagcttttgatgatttaaagatgtttgatccattttttgaggttggttccacaaaatcattggggaatagtaacttcgttttctagagactaataaagtcggaatttttgttgttggttaaccaggaactggacagcattcctgaagctgctttagggaagatgtggtccaaaaaagctcgaatggatgaggaatttgttgtgaacctaagtgaagataacttaatatgcgacgaaagcatggaagcttcgtctctttgggaaaatcaggttctccccaatcctagccttggaactgttggggacttcgatggtttttcgatatcagatctggagaatgcagatttggggactcccctgatttcctcactgtaagatcctgcttgaaaaaaaccttgtttactttcggaaaattcaatggaacttaagattctaaattagttgtcatggaggttttgcagttggcttctcaggagagcttgctgaattggattggatggttgtgattggattcttgctgctacacaaaga

SEQ ID NO: 29032 - DNA, 529 bp, Arabidopsis thaliana columbia
caaataatctaattatgtttgtctatatgatcaatgagcattaataacaagtctattttcacaaacgccttccagatatgaaagctcatatcaaaagaagaggttggatctaaatcaacttttagagtagagaagtttccggatcgacacataacagatctgggtctgatcatggactttggatcgtgagaatgtccctctacacccaggtcctgcccttgacacatacatataacatataggtattgggcctctaatttcgtggcccattttgtctaaaatattaatagtgtcttaagagtatcttaaaaataaatgaaagaatttaagcccattttagtaaaaataaaatagcattttgtttcattgtgaattttttttttttataacccacaattagcgaaatatagaaaatttagcagtttaaaaagcctccccgaaaaatgacaagaccgacactggcatcaaattgatacattttcagttaaccggccataactctttaccacagctcggattaaccacaatg

SEQ ID NO: 29033 - DNA, 534 bp, Arabidopsis thaliana columbia
ctctttttttttttttttcgttcagaggtaaatttctcaagtggcttcttaatgtattaaaagaaaacagtgctttgttttttaactcttgagggaactaatcacgtacctgatacagttagctaggaggggaaaacaaaacagttgattaagaaatgattggcaactagctagtctagaattcttggagtagatgactttgatgagtttgttgactgactaaaattaatgaagataatgtatcttatgatatactagcaaatctaaatctttcacataaacagattgtttatgtagttgtaaaaaatagtagatgtttacatatataatataaagaaaaacatattcgttcataatcgaagatcgttcaatttttatgtttttgtcaatcaaacaatttaaaacctccaaaaaatgcatctgctggaagtaaacatagttcttggtcaagaaaaaacgaaggtgttaataaactctagatgactagatggtggtatgttgtttgttttggtggcaaggctgcaactgcaaaag

SEQ ID NO: 29034 - DNA, 510 bp, Arabidopsis thaliana columbia
tatgtatcgtaagctcacaacaatgtgtatgaaatacactagcaaatcacgatctagattaccaaactgtggaagaaaaaattccacactcacaaaaattaacaaaatttttaaaaacaaattccacactcattcatgaacatatatagttctaaactaatcgccagtgactagtaattgcgaccagcgagtgcgatcaacgaattgttctgttattcgtttgacagttgctactttgttagtttggtagtcactatgatttggtcgctccatccaacgactggtcgtttgatagttgttgatcgaagtcacagtcattagtctctaacgtgcctttaatataaggaatcttaaacttaataataaagaacacaaaactggactaatacaagatgccctaaggagcaacattaattgtttcgttaaatccataatttaatttatagtacagtttgttacttataaaaaacttacacgtattagttttgttatagtacaatttattaactt

SEQ ID NO: 29035 - DNA, 508 bp, Arabidopsis thaliana columbia
caagaacttaatttaaccttaattaacaattcgaattaacaaacaaagagaagagtactgaaagtacccgctgcagaaaaactgcttctttaggagaggtagggaactgcactaaacctattccaacaattaatagcaaaggacactacaacgtatataggtagctggtgcaaagatatacattattaatattgactaactgagaatagcaataagcaaaaatgagcacaacagactcattactaaccaactatgtttggctacgagccataattgcagcctgcaagagagcaaactaaaaggcagagacagctaccagcaggctcaaaatcttgaccacatgcttcattgtccttgaaacaaagtttatgtaagatttgagtattgacaatataccagaaaagaggactacactaatgcattttccgatttcttgcatatttggagctgaccatgaacgggtgccattaaaggatatctatagaagtggattccttcaaataacaaa

SEQ ID NO: 29036 - DNA, 332 bp, Arabidopsis thaliana columbia
gtaagagactatgatcattcttatgcagtggattataaaatgaaaatgaataacaaatcattacaaataaattagtttttaacaatctgaactactttatatccaatggaaacaatttaaacgtatccaaccagtaacacctctttgatattgaaggacacaaatcagagtactgtactgtgtaagcatatttcaaatttgttacccaatctccaaaaacaatatgtcaaataaagtaatacatctcagaactcactaaagaacataatacaagtcaactttcgaaactccaatcgatcactcatcgtcatacattaatttcgttccatgtg

SEQ ID NO: 29037 - DNA, 402 bp, Arabidopsis thaliana columbia
taatatttacgggtactaagcgatcgtcgtgaggcgtcccaattttttttgtttctttttatttgagaaatgggtttaagaaaaactgcaattttgtccataaagctagtcagaattcagaaatcagaagtagagtaatagatacaatatgtaactagaacttcagtataccagtcatactcgtagttaactatagcaaatgagctcatctagaaacagcctcgttaatgtcgaatgtctatcgagctcggtatcgattatcatgctaggttgcatattgttaaatttctattgttctcggtatgttttaatcagatgtcgagtctataactgtgatccataacgtattcgaatgtagcagcatattgatcgaatgaagacatcaaactagactagtcgatc

SEQ ID NO: 29038 - DNA, 714 bp, Arabidopsis thaliana columbia
taaagaaaagtgattgcaaacaacagatagtgttcttgatattattgataaatagatgtgtttgattgtacaagtgattagattatgaaaagaaaagtgttttgccttcaaagtcagagctcttgagtcgtctgaagttgagggcgttatttgtgtgtctctcttttatgcgaagtccttgagtcgcttcatatagacttgataagtcgcctctcctgcaatattctcggaagatttgaatatatccttaagtcggttccagaacctttctgccttaaggaaatattccttattcttcagggacttcgggaagattttctgatttgatataatccttgaagattcttccatatcatttctgtgattctcgtaaatgatccggtttccctggaaattatcctttgagcgagacaatattttacaagtctttgccttgggtgttcttgatgttttccctcaggatacttcctctatgttcggtgatcgttcgagaggtggcttcggggtatccggcgtgttttggctcgggtgcggtgacgactgcatgtagcaaactatctcccaaggcgatgtaggctttccccgtagcgttctcataatcggcttgggttactgatatatccctattttcactgattttatctaagttttaagtataagattttgagtctttatgttgattctcgagtatttttagtgtcttttcggtattct

SEQ ID NO: 29039 - DNA, 1071 bp, Arabidopsis thaliana columbia
gaatcttgaaatttacatgtaatgataataatttagaatgacatgtggcattcactggtgtgatgatgtgtcacttatgtagaaaatttgcatctatctatgtagaaaatttcatatatatgatttgcatctatctatgtagaaaattttgaatcatggtttgataaattcgtgtattataatctgcaaccaacaaaaaataaaaattttctattttttttcacagagaaaaatcgcaccggattgatctcactcgcggacaattttctcttttaaattttcttttttcttagcataaattcttgcaccgtcgatgagatttctctgtcgattccatcaacgatgagaccccgtggcttgtggtatttcaatcatgatcccatgcaacaacttggcgagatttttctgatcaaaatcaatggagcaatggaggtgaaacaataccatgagactttgtgatatagtgttctagaaggtcagctggcacgtgggaagtttgggttaagaagataagcacgtgcgcattggtgagctggcaatcaacttgagagttacgacgttggatggtgactgaagacgttgttaacgtggttaacgtttacttcatgctttacacaacgaatatatgattgtaatctctctagaattctctagactcttcctcattgtttgccggatgttctcacgtcgagactcttgcaagtgaaaattggtatcgcatttttaggaacgttatatcaagtcaatcggattattcagcttttactctgttttgtgttactctgttttcaacgtattgttttgttatcactttgacgataagagctttaccggcggagttgcgatgcagtgtggaagatggagacttcacggcaacgaacgaaagagggtcatagttaggtttggggtctggcgacacataaggtctcacagggcagtcagtgacgggagagatcgtatgtggtccgacgatgctatgccaccgttgatggtttccttatctactccctaccgcttttttctctctcacaactaagactgaagcctcttcaacaaactcaagctcggtta

SEQ ID NO: 29040 - DNA, 678 bp, Arabidopsis thaliana columbia
tgcacatgtactttgttgagtacccaaaaagagataaattataaaacgccatttatcaggttttatggaaaccatcatgccaagtttttggacacaaaaccacaaatttcaggaagaaagattgagaaaggtcattggtaaactaatatgacaaaatcaatacataaacacacaacagtttcagaaacttttgttttccccaacacctatagatgacatcatatcccaaaattgcagcttcactaaaacttggcacatatagagatggagaaaaggagagaaacaaaaacaagaagaaaaacctaatgtagtcctcagagtcattattgtgcttcaacatagcaacttcaaactgctttagcaattggaacgatgagtgtaaaatctcattgcaactcatcattggactactaaacaaaactctatctatatctgaaccaatctacctacaaagcaaacttgttatctttgtatccaaaatgaagccagatcatgtgttaaacatcagtacatcaccaacaaccacaagagaccaatgattatgaaagatacagaagcaaacttctctaaagatgaatcacacacaagatattcccagaatcacattcatcaacgcagttgaatctttcaacagactaactatgtaaaaatcaaaatcccaaaatcaagcatatatat

SEQ ID NO: 29041 - DNA, 596 bp, Arabidopsis thaliana columbia
ccttaaaggagtcaaaaccaattaaagaggttattaccgatagccttaccatgtttccattgtaagttaccgagacaaaaagaaacctcaccgtaacacagccggcgtgaccgcctagaacagcaaggtgaattgctgagtgaccttccgtagtcaatatggcattcacattctcattaaactccgctgacacaaaacgaaagaaaaaataattaagaaaagtgaagatgtaattgttgttaatcaaagaactaaaataaagctttgagatctatttacccatcatttgggttaagccttcggtatttccgttctgaattaaagtagcaatttgcatgaggttttcgggaagatggagtagtgtcaccattttttctttctctcttgttttatctatattcttagatctctcatggttggtttgatctctactagcgaaggggtttatttatttataatggtgtgaaatcggtgggtggatgctaacttgcacggttttatctatcttcactcatgcaacttcgctttatcaaagtctaattagtattttgatcgatgactctattaggttagaacttaaactagaagaatatttt

SEQ ID NO: 29042 - DNA, 538 bp, Arabidopsis thaliana columbia
ttacgattaatctaatgtagatatgatttagaaaattaaaaagtaaaatctgcctaaaacagaaagaaaactaaaaaaatgtaagggatcccggagaaagtgggaacacaaagaaagtagaaaacaaagttgatgtgaactacagagactaaacagaaaccacaaagacacggccaaaaagacctactcctccactcacactcacttgtcttttgggttttgtctcgagacttggctccctccaaaccctaaaaaaattcaaatgaattcgacaacaccaaacccctaataatcttcatgaaatgatatttgttaggtcgagacaaaattatgttttgaatagtataagttatagtttcctaagtggttaatttggtcaatgacttgacttgctactagaattattgcttagacgttaactcaagtttttgtcacctaaaattcaaagtaaaccggaacaaaccgggcaattcgtaattaagaaatatagagagaaaaacagatagacaatatttaaagacgtcaagtatgtatgtac

SEQ ID NO: 29043 - DNA, 561 bp, Arabidopsis thaliana columbia
ctcaaactcagaaataaacagcttccatcttaaggactcaaagaaatcaaactcgaaaagtagagcagccataccaattacagaagcatttccaccaagaaactcgtataaagattccaaaaagtccttgtaaaatgacacaactcctgaaaaattacaagccaatgtatgaagcacactagtatatacacgtgcatgcataagagtcttgagcataataatgaaacctggatttcccggaataaacaatacatggaatgtgggattctcagcttgaatttccatcatctccgtcatcgaactttgatcacaaatacaaaaaacaaaacaaaaagtgtaactatagtcaaagaaattagaaaatttcgtaaaagattaatgtaacaatacccagaaactctgcacaatctggatttaacatgtcttttagtttcattcatcaatttgatttgagtcccatgtctccggtcacgcgattcaacttatatcttctctcagaactgtcaacacttgaaaggagaagatcgagagaattaatgagacaacagagaaaccactaaa

SEQ ID NO: 29044 - DNA, 584 bp, Arabidopsis thaliana columbia
ctatgagaagttgggagtattccgtggtcagtaaccactctatgaggacaggacattgtggtgtggccttcaagtgatgcagtagaaagcgaaaacattgagtaaattaacattttctccactcaccatcatcaaaaagctcacatgtaagcaagaatcgataagaaatagcaggagctttaccaggcattttacacaagaagcaaggcttcataggacaatcgatatacgttgctcctttaaatccagcttcatggccaggctgtttacaaacctataaaaccaccatgaaacaacaacagatacgaaacaatcaaagccaaacaccaaaatcctctgtctctgcatccaagtgaagaatactaataaacaataaagtgaatttcaggcaccattataatgggaaccaatacagtgaatacttctaatatgttcgaaatcaaaatcaaaagtcattacttattccacataagcctactcagaacttgaaatcataagccaagtaagaaaactcattagaaaagttagggtttttagaatagcgttactttgcaaactttcttaataagcttaacggtaatggg

SEQ ID NO: 29045 - DNA, 550 bp, Arabidopsis thaliana columbia
tgctaagtgactatccaaattttataattctgcttcaaaggccaaaacttgttctgctagttctaattgaccgctccaccggtaatatgtggaccggtcaaatgctaagtgactatccaaaattttataattctgcttcaatagccaaaacttgttctgctagttctaattgtctttgtctccccaccttcctaccaaacaaaaaaattatagagattggaaacttttatgaagtctatagtaatacaagttataaaaggtgttaacactatcaagtgtacagattacaaatgcaaagctaccggttcgactaaagcaaagaccatccaacgcaacctactaatactgttactcatcttttaaaagtgtcagccatcaaactaaacctaaaccaactctagctcctgcaaatcccagaagcataacccagttctttctcttctctctttttgctaaaaccgaactaaaccgaacgttatgacaatgtggagcctgtcagaggagaccacatgtggtatctctctagaaacatttagatctaccattttgg

SEQ ID NO: 29046 - DNA, 578 bp, Arabidopsis thaliana columbia
ctgaagtacatagatgttaaaaatcattataataccaaaaaatttgatttattttttatgttttaaacaataattctaagcttacgtaatgttatatgtgatgtgaactaatggttttttgaattttcataattttctttgcatttcatgtatttacctattaaattgattgatcttgtttagtattatgatttcattgattttaaccttatagatataaccttttggatcttaaactttaaaattcatatgaatagggttgtgactcataaaaattcatcataaaatattagcattttgcaactattctaaggaaaagttacaaacaagtcattacataccaacatatatttggctgagttgtgacgaacaactgagattgagacgattgtgctaccttttagcaacccttgcagtttttgttaagatattaaccaacataatattgttaatatgttaagtttcaaggcgttgcacaaaaaaaaaaagtttcaaggattctaaattgatttaactactatatctacaaaatcattacaatggcaaaaaaccctttaaagtttttaatgttttaacaa

SEQ ID NO: 29047 - DNA, 643 bp, Arabidopsis thaliana columbia
gatctagaagtacaaaaagcaattcaagaatcaatcattactttatttatgtatcaaacttatatttcacatcgtaggcaaatgccgttactaatcaatttcaaaaaaattgttaagactaaaaagccccaatttttccaaaaaaaaattttactaagaaattttattttattttgagttttgcaataggtcccataatgaattgagccgggactggataggaccaagtgtcgtatgatcaaaatatacaattgtgactgggttgggtctaaaagtctaaaaccattgcctgaaacgttatggttcctcgtagttatcgttaaaagagagattgtttcaatcttacagatcttattaaaatagtaaccgatgtgaatgtgatcttattactaacaaaatcaaaatccaaattaaacaacaatcagagacatcgttttctctatatactatatttacttaaacacgatcgatcgaatattcaaccaaaaaagatatttgttttgtcgtctaacgaagactaaacaaaacattaagtaaacccattcctttgtacttttaaaaacatagcagtctcttctctacttgctccaagccttcaacattttcttctcaaatggcgctctcctctgtcaatctctcttct

SEQ ID NO: 29048 - DNA, 965 bp, Arabidopsis thaliana
ctgagaggatcccctcacctcgtaccctccatcttctctcatcgacttcgtactgcacaaaaacaaaatcccaattcagaaaaacaaaagcacagaacaagaaccagagaagaatcttcaacaacacaaaaacctgtaatttgtgtgtgcccctgcaccattccaatctccctgaagtagtgagagactgagtgaattttacagaaccaaacatttttgtttaactgtaatggtgaaaaagaaaacaaaccggaattggtttagggtctagagacagaacaactccagccaattctgtgatcctctattttcacatacccaagaaacagagtcataaaacagagtatatcaagatttgtataaatcgccatgagtgttgtttatatattacctcaagaatgtaacgagcaacccagacctgatcggcggcacgattccaacggtgggaccgacttggaactcccactgaaacccacacaagctcagtttcaaggatttggtttcttgttctgatattgaatcagaagaaatataggaaaggggtaaaagtaaacctggccaggcataacttcgccgttagtcccactgacattgattccggcgtaaagacaagctttgtaatgagaatcaacgatgtctcttccaaaggctttgtctgctccaactccacagtagtacggtccctgttttcattgacaaagatttgttctttttttataaaaagaaatttagtgttgaggtcaatatggattttagtttgatcgctgggagaagttttacctgaggacctgggaaaccgccgaccggccaacctaccggccacttaatatccttttgcaacaaggtatactcttgttcaattccgtacctgaatttcaatatttaaaattttgaaaaccttaattaatactattgtaaataaactgtggattaaccaaacatgaaaaattatcgcaaatgattaa

SEQ ID NO: 29049 - DNA, 504 bp, Arabidopsis thaliana columbia
ctcaaggatttgatctttacttgatttcttaaaaacgaattattttaccagagcgtaaaggagattcacggacccatggagatgaaccccgtggaccctcttcatttaaactctttcgagttattagacaacttttataaagttgaattgaaagcactctatgtcgtacttggatttttattaaaagtcgataaaagatattttgatacttgtgtcataagcgattccaatatagctttgtaggtctatgtgttgaagtggactagagaagaaggactgtgaaacccaagataaacttttccaaggtgatgacaaaaaataagtcaaaactgtcgcactcttattatttatagccagaaattcatgggtcaaatttcaaaatctaagcacccgcattactactactactactcaaaaccgtaatgcttagtgtaatgacatttgagtctttgactatatgacataatacatttgaattaatactgcagcacatatagattgact

SEQ ID NO: 29050 - DNA, 502 bp, Arabidopsis thaliana columbia
ttcagctagtggccaaaggacaagtctacgattggattagagaacctaaagaagttcataaaagaaaacaaaagcttacatttatagttatcacaaaaacttatacaagttgatttgttcgggagttaccgtcgtagctcgttccttagtgcttcctggatgagaccagatgattcagaagctgactcgttgaactgttttaatcataagattttggccaagtcgtacaaactccaatcttcaattttcatgagaggatttaacagaggagccaagaaaccctagaatcctagattatcataaaacatgttgatttgacgagaaccaatttgattctggaaccagaaataaaccgacccaaattcttcagggggaacaacaccaaacttaaacggaaaccaaaccgttgtcattgtaattaacattaggctttggattattgatggtaaagaagacttaaagatcatcgattaatcgtaaattgtgcttggtgaaaatgctt

SEQ ID NO: 29051 - DNA, 338 bp, Arabidopsis thaliana columbia
catcatgaaaacgagaaacctaactttatttttcgcacataactccaagtttcgaaacttcgacacatcaacctaatcaggggcacgtacctacacacctgtcgcgaaactgcaacacctatcttgttctctcgccgaccatgacttgctatacataactctgactaacgagtcggagataactcacagttccaaacacactgcatacacgagatctaaaaaaaaaagcttttatcatttagaaaaatttggcttcgaatttcttcgaagagtgaaaatggcgtctcatcacgactagagttacaaagctggttaaccagaggcaaggctcaggtact

SEQ ID NO: 29052 - DNA, 535 bp, Arabidopsis thaliana columbia
gagtttcttgagcctcaagctaactctacaagtgaaagaagagaaatggatctgatagagatgctctctggttctattcaaggtagcaacatctgcttcccgttggtctagctacatccatgatcatgtgatgttatttgatcattctatctttatgttcctttgtttaataatttagtcctttcaatttcttaaaactttccatagatcataagtttcaagctgcttctcctatcaaaataattaaggtttgtgtgctagctacattgtagtcgatttttgtttcttggaattatattgaaatccttcattaattttgttttttggctgttttcatcttacgttatatatgttgtcaagtaattaagcgactaatttagactttagagattagctagtgtgaaattgatttccacttacgttacgacattggtattaatcaaatttaagtccactaattattttgttattgtattcatcaagttaaccaaataaacttttattcaaaaagagttgaacaaactcgaacaaacaa

SEQ ID NO: 29053 - DNA, 488 bp, Arabidopsis thaliana columbia
atggattttgaagatcgaaaatttatcggattcaaagtatattgtacaaaagagtttgtctgatagatatttatatgcgggaatattcggacatcttttttatatcagtttttgacgataactttttaactagttttggcccttatgagaggaactcgtgagcaaagtctttttttttatataccaaatttttcattaaattgattaaatttaactagaaagaagaagattaagcgtatataaacacaaatacacagacacgttttaaaacaatggggttctgataaattatgttactaaattttgatcatacagaatgtagtttggcgttacaagaaaactagaggagaaaacaaagggcgaaaccagacttcatttaaggataaagtattggtgatgagattatataaaaaagggttcagttttgggttcaattattatctctgtcctctgagcttcctatctggtaatgccgagtgggaagtgat

SEQ ID NO: 29054 - DNA, 532 bp, Arabidopsis thaliana columbia
cccgggtaccgagtgctgttctttttaggacaccaaacactggatcttgttttaaatactgtttgtccataaatatttattatatatacagatgacagaatagaacaaaaaagaaaaaaactaacatgctgatttctaacccttgactgtaacttacaatttaaagatcaaaaaacatatgaaaaatattattgaatcatcataaatggttgaatttcaatattctaaaattcgaaatgctggaagctaagaaaattataacgagatactatccgataccaactattatcagtcaattacaactagtcaactagtataaatcaatctctaacaataaaatactgatggaagttgacatgtttctttactagacaattagagatgtcacaattggtccaaacgaattaatacagtggcaataatagctgtaacaagttgtagtgaactgatgagataagagagacgataattcaattcaaaaataccccgatagttgtgtgctattggaaataaatggtcatgaatgataata

SEQ ID NO: 29055 - DNA, 619 bp, Arabidopsis thaliana columbia
tgccagggggcaacaccaacaagtcaggaactgtctcgtccttctgcacctgtttttatagtgaaaaaatacgagttaaaatgaaatctcataacaaagagaagattgtgacatcatagaaagcacagttcacatatattgtacacatccaagattttaacatcactaactatacgaggattcagagaaaactcccccggtgaatgacttaaactagacctcccttccacaataactaattctaacactcatcctgcgagaactaaacaacatatctagcacacaagtattcttcaaggtttatataaaaaacttggaaagtaccgtgtaatgcttctccagctcctgcactgcagaatccacatccatcttaagcgtattaacacgaacataccgtggtttcaaatgacctgcatccaaatttaaaaatcaagctacagaaacatactcaaaagccaaaagtaagtgaaacacattatataaaggagggtaacaaaataccagtaagcttagaacccaacaactgatcaacactatcgacttcctccgcatacttgtttatcttattgaaatctatcatttgctaagtttataatgatttctatcattatgaaagatt

SEQ ID NO: 29056 - DNA, 477 bp, Arabidopsis thaliana columbia
catattccgattcaagaaatccgctcaccagactctacaaaattctcgcctgatgaactaaggggggggggcttattgttggacatgagcttcaccctcaacatatcatttggcccaaacagagacttaagtgtttaatgggcttgttgtctccaacaatttagcctattaaacgcaaggggcaaaacggtaatttacaggaggagcagaagaatctttaggttaagaggcttgtcctataaataatgcactattggcgaaatagtgacacagaagataatacccagagaatcagagcaatattcggactaaaactctttgtctttcggttcgtttttgttctcggttcgttttgtcttcggttcgttttgttctcagttcgttttgttctcggttcgttttagttcacggttcgtttttttctcaattcaagtcgtgttacgttgccgatcgatagaaatcacttgtaactattca

SEQ ID NO: 29057 - DNA, 530 bp, Arabidopsis thaliana columbia
agaatttcataatcttgatcttgatactcttataaaaatttgtttatttctgttgatcactgaaatgaaatcatatccatccacacaatccaaatatggttcctttgcaatattagcaaccactcttcaaatgggccaataatgctagtcactgctataataaagggcttttaggcccattaaataatcatttggtctttcaaaggcccatcacgctaagcgctagaccctcctccagtagtctgtatatgagatcctatccacaagcctaatttggttccttttcaaaatacataccaaatttcgatttgtcaacaactcgtcaaatggatctcgaataatcactaatcactgctataataaaggcctcattaggcgcattatagaaacatttggctctttgaaaggcccataacgctaagccctagaccctccatcggaggctaaaacctctcggctcctcctgcaacttccatttcagttcaagctccggctgaaaatggcgaatgccagaaagtcttcactgtaga

SEQ ID NO: 29058 - DNA, 1213 bp, Arabidopsis thaliana columbia
tgttatgattctgacctttgcttttgcttattaaaatgttttcctattgaagtaatctgcaagaggaatgatctcaaaagaagatatctaattctgtgttgtatttgtttagaagacattttcaagtgttattcttacagtttaaacatttcttctacccacatgatgggttttactatcttctactctttttcttcttctttctaaaacaaaacgtaaaagaaaaacattgcaagagatgcaacgcaagagcttctaaggccaagcaaagtcaatgtcactgttatcaacatcccacactccaagaccgatctcatcaaacaactgctcataactccagcttgagtatcccaagaaaaaccagtactcacttggatttagctctctagatttcaactcttggattcgacgggccacagattgatgatctaggaaatacacgcctggtgagatttccgggtgatcatggtttgtggaagagtctcgctctcgggtcagagctaatagtggtattcctggatccactacaggacctccgaacgatagaggagtctctttcaagagctcggctgtttcaccgaggtcagggaatgatttccaccttatccgtttgttaaagattaggcccaggaaaccgatctcggggcctgcttttatgatcagaatctttgatttggcaaatgttagggaggcagctagcttttctgtagcgaccaggactgtgccagttttcacttggggagcgtttgtgagcgagtgtattggaggcgattgggaattgacctggtcgtggtttacctctctttcagcgggctctctgttccttaaaacgacctcaacaagtttatcaccatctgtcactttattatttaccgcagatgaagaagactgatccaccttgtttgagtttcttcttccatttctagacagagtaggaaggagtcctgccagagaaagattcataactttgtttattatgctccagatcaaaacagaataataaaaatccaaaagcattcctcagtaaccagcttaggcaggaaaaaaacgagttactacgaaaaaattgagtcacaagttgtaaaacatattaagattctgcagaaaacagtatttttctggaaggtcagacactttagagataatattcagcataaatgtgtaaacaactgaaagacttactgaaaaactcgcgagagttattcgcatggcg

SEQ ID NO: 29059 - DNA, 465 bp, Arabidopsis thaliana columbia
tgatgaacatactctgatggtggagcgacttttgaaccggcttgttggtttagcttaagcaaccggttcttaagttcggtataatcttttcaacaattcggtttattgttcagatctatgaattttggttcggtttggtttttttactttctatttcagttttatcgtcggcaaaattagtcaaaggtcgtcaaagagaagagaccaacaccaaaaatacagtacagacacttcttcacttgggtcggagttgttatgaagattctaccgttggtgcatcttcatgtcttttccacttcaagagtttcaaatttactctgaattgagcaacgaatgtttccgatttccaatttaagatcaagatagttggaatttatgtctttccagctttagatcttgaactcgtgaatgtgtcggcaggattagtctttgaagcttgttgttaaatactcgaacttgaaggtt

SEQ ID NO: 29060 - DNA, 568 bp, Arabidopsis thaliana columbia
tacaacacacagagagagagtccaagtttatgaacagagagagtcaagaatacagaattttatcacccaaactgcgacgacacatcatgagtacaatgcaagatttatcttctactgtgtcgtttagccctagcttcagtttctacgcctccggtgacctagtcgaaaccgccgttagagttatacgtgagtccgagagttattattccgttaaagttgacggcgaaaacgacaaagaattcgagttcgaaacattaccgttaggtgacgagagcctctttcatttctcaacgatgacgacgacttttaagcgctcttccgacgacgatgacgtggcagacgatcgagtcacctcgaagaatcttttctacggtggatggagtgttgatcctccatctctaacttcgccgtcggaatcactttcatcgtcggattctgacgattcggaaaacatttctccgagcaaattctactgtttctggagtccgatcagatcccggctagagacgatagcttgaagagtaaaggatcttcgagacggtgtcgtataaaggaatttctgaggaga

SEQ ID NO: 29061 - DNA, 649 bp, Arabidopsis thaliana columbia
ggagttgcttattaatgttttaaatttggagggatttatactttattcctgaaaaaacataaacgaagaatgaatctaatcttttgtttattggtgagtaactaactacctatattcaatttcataccggaaaattttgtattatgtactaatatactttgttagactcgtcgttaacgactaaacgaatcttgtaattttccatagctttcttgacttccactgttgtattgcgcgtttcaagtgttttcaataacttatatttgctcttctctctctctctctctctctcttttttgttgttgttgttgttcactttgatgaatcttgacaaagtttacaaagttgactctatttaagcaaccaatggcaaaagatgatcgagtgaaaacctattatgtgtatatagcactaaacattatttgattaacatccaaagatatatatgagtttatacagtttcttagtttttaaatcggtggattcttttttaacaaaaaaggtttaagatcttgtagattgatttttgttcgcaaaaaactttattatagatggatttttggtgagtcagataggcccaaaaagtgaatttactaatttcttaacagttatttaaaatcgcaagtatatatggatatcatttatatga

SEQ ID NO: 29062 - DNA, 467 bp, Arabidopsis thaliana columbia
agaaaggagtacagcaaaatttaaggaatgaagtgagattataattctcatccttgacctcacatgtgattcttaaaagaaactgtaaaaagtaaaaacagtagtatgaaaataaagctaagaatatcgatcggtggtaacattcctacatttctgttttagtttctcatttaaacatcttacattcctttcaatcaaagtataaacatacatatatagattatatatgtatttctacctcttatttggcaacaactctaattttagtcatagagtatacactttctgttagaggttataaaatggttctcataaggtgtgtaacataacatatcgtacgtctcatttgtgatgaattctgtaactctgatgaaactatgcgttttcaagaagaaagcggctatgtttacggagtgaaaaatgtagatcatgaagatgacgtaccacagaacatatacatgtttcac

SEQ ID NO: 29063 - DNA, 520 bp, Arabidopsis thaliana columbia
tgcggtaaattgtttctttccatcaccgtcagcagaagcattggaagttcttacagctttgccggtacggtaggggtgttttctagtatgttgtttgcaacatttcctacaacacgcaatgggattggttttccactttctagtaaatgatatcaatatgctgtttttttttaatatcaatatgttattattatttgtaaggttgttttttatatataacttgtggttcaacattcttttttgatgatctcttgaaatagactgttccaaaaaccatgtgaactatttatggtgaatatgtattaatattacttgtatgacaatgagttttatccggaaatatccaaaaacaaatacgtcttcttttttcttgtggacaaaaaaaatacatgaaccgttttccaaataatacctcgttgaataaaaatcatcaaaaaactgtaagtttaaaaattactgttttggaaatttccaaaaaaaaaagttaacttaaataatatctcgtttaataaaaaaatgt

SEQ ID NO: 29064 - DNA, 412 bp, Arabidopsis thaliana columbia
ccgacctcgtcctaaaaataatataaatacatcgaaagattatattgcggtataaggttatatggcagaacgaggttttgagtcattattaataaaaatttaaagtatcatttatccgccgattcaataggggtgaaattcttactctatcattttctatccctacaaatttctttttggatgaaatgtttaactgatttatgaacctgtaaaaaatatttacaacgagtgttttgttcctatgttagactgacaagactttaagaacagaaatgcatttcagaaaacaataactgggggatgacatacgaagcgttggcgatcgctaatgatctcttggattagatagttcgattttaagttaatcgatcctttcaaacctttcttcatttggtgtagacttttacatgac

SEQ ID NO: 29065 - DNA, 408 bp, Arabidopsis thaliana columbia
caaaacaatagaagagtgtccttactgaattagaatcaagttacattacctgaagagcttggaatgttatatccatatcttccagattctgaagcaactcaaccaaagattcttcagactgaaaccacaaacaaaacaagtttccgtcttcaagctgaaatcatcaaatcaagatccaagtgaaaaaaacttttaagcaaaccagatcaggatcttcaagtttctccttgatttcaacaatactcttctgctcatcatcaagacaaaccagcaaagggatcgaaatcgtcatcgtcttcaacattaacagatttctctctaacttcttcttctgctgctgctgttactccttcttcatcttcctcgtccgtctcctcgtgaaccctcccattattaaccctaccaatc

SEQ ID NO: 29066 - DNA, 467 bp, Arabidopsis thaliana columbia
cacttgaacaaattatttacgttactataaagtatatatactagcgttctaaagcttccgtacgtatagatttattttacaaaaaaaaaaaggtttcttcgtagacgtaataattttggaaaatattaaatgtaccaacaagaaattgtttaacaaagaaaaagaaaaaaaatatttatcaacatacaatcaaatcctgagtaaaaaatataaacgtagatagtttggctttttaagccaatatttacctttttgaaaagtaactgatttttttcttcttctaacttagtatgtctcacaataaaagaaaaataattaaaaagttttcgtttggccacctaacctaattttaaaggctgacaaatatagtttagaagccaatgtggagtggctaactaccctatagtttaatcaaagtcaaacaaagagttatgaatctctcttggatatttaacaaaaataactat

SEQ ID NO: 29067 - DNA, 555 bp, Arabidopsis thaliana columbia
tccatgtcgatacttgtctctcattctcaactggttaccctttttcagattcatccactaagcaacctcttatgattgcgttacaagagacaatctttacattttggagagaaaaaccggagcattggggaaagtcactaactcattctttaatctaaaaaattgtggatcattgtgtgagaaacaaggcatcaaatcttagaagacaagttttcaaaatggagctcaaacatcctccaagcttggttccgttcatgagaggctttcctccttgattttcttccccttctctcatatttcttctcatcaggtcatatgtaaattaggttgaagagttcaccttggtttcaataaaccacaagaagttttttttctgtaattaaaacatccattttattttataaatagaaattgtttaataccaatgattgaagggttcgatctttttctcgtccacctcgattgtttccaacattatttgttaacactttttagaacattatcttaataagtattataaacattatcttaagtattttataaactaaagcaaat

SEQ ID NO: 29068 - DNA, 589 bp, Arabidopsis thaliana columbia
taattggcattatttttagtagcctgtagataaaacagagctggtcaaaagatgcacactatactaaaagtctaaaactatatatctggaagattctttctttagtcttagagaatcttgaagaaaattattgaagaatatttggtaggattagtttagtaatctcaatcatctaacaaccatcttgaaactggaaacgacaaaacatgaagaccagttactcttgtttggagatatattaacctcaacagctattttttttgctgaagaagaagtaacaataactatgaacttatcaacgaattaaggcaagcaactgaattagaagaagctaatctcaacaatgttgcatctccgaatgttttcttgaatttcattggagatagacaaaaagttggaagcttaatatagatagatctcagttttgtcttccatggcttctgataaatcttagttttcttgaaattgaagcaatattatatgatcttgataagaatatataggtaacttgacgaagaaattaacttctactttcaacttcgttatcactggttcaagtgaaggaaaattgagtcaaattgggttggga

SEQ ID NO: 29069 - DNA, 552 bp, Arabidopsis thaliana columbia
cccattaaatatcaacaactaagttcttaaaaaacaataattagttctttaataattaattcaaacaatatatgttctcttccagtacgccacaataattagttctttaataattaattcaaacaataattagttctttaataattaattcaaataatatgtatgctgtacaaatacccattcgtacactgttcttatagtacactatgtatgctattcttatagtacactatgtatgctgtacagaaaacaatccgtacaccttacacggtgtacagaagcaatctgtacaccgtgggtatatacaaaataataagttataagtcatattaattctttgacatcaaataatatacaaaaaacattctttcgattttttaagtcataagcataagttcaaatctaataaatatacaaatgcatacttcgatctcaagtcctaaatataagtcttaagtcataagccccgaataagtttagaaacacccaaactctaagtttaggaacaaataactagtactcgtcctcccattcaacaaaagcagcatatgt

SEQ ID NO: 29070 - DNA, 572 bp, Arabidopsis thaliana columbia
taaaaaagtcatttagcgcaatctttgtccattaagataataaagtcttccgaattggacaagcacttcgagaagacttggggctaattgttggtgtcggatcccgcaccgaagtttgggacctacgaaagattgccacgtagatgaaaagtaagcccacaaggagtaaggcccataagatacttgggaagaaggcgagttatgggcgaaatgatcacaccgcgaggtgggggcaaagtcgaagtcaaggatgggctgggctttgtcggttaaaaggcgaggcccatgaagatcagagtcaattcaaattcaaacgtttgagcaatgaattcgaagaccgaaacggacgcatttaagagagtataattgtgtgtaataaggaatttaatgtcatttgtgagtataagtattagggcaagaagccatggaagacacacacatttttgttaaaacttaccatacacatttttcataccaactcatagttttttccataatacttagctctttctattcaatttttgtcctcaagaataatccttctcactaaacaaataaatatttgagtatgt

SEQ ID NO: 29071 - DNA, 801 bp, Arabidopsis thaliana columbia
acagaggaccgcatgtttacaacaacaacaaaaaaaaaaaaagaaaaaaacagaggaccgcatgttttaaagttcctttggtgaatggaggaaaaaacacgttactcaaaaagtaatacgataagtggtccggccatttctagctcctccattactccattcaagcatctagatctaacccctttggttacacatttacaatgaatcttcttagaaaatatctgacaccaaaacttggtgacttttttatcagttccgttcaatattatcgatttttttaggatcacccaaatgagtagagaggagaaccttgactttcaccattaagaaacattgtatttgtcataaaagaaatcaagatatgaagaccgtgtctataaagtctatccattcaattattttgtcataatattcaatgtaaagaataattcagatcatcaccaagtgatgtaagtagtgacgtatgcgagagtaatgccacaagaactcaatttcgttgtcctaattttatattccttttctcaagaaatctatgtatccacgtaactcaatatagctttcctgatattctttttgtatacttccatgaagtgacgaaatgttgttagtaaaatgatcttatagatcaaatcacaatgatcatcacccgatttggtcaaaaatcaatggctccgaatggagacgtgcagttcaactgcggataaagtgttgtgcggttcaaatagtaacaaaaatatatacatacatatatatgtaaagaatttcgttactatttgaatcgtactgcactgtacggttcgg

SEQ ID NO: 29072 - DNA, 583 bp, Arabidopsis thaliana columbia
agcttgagagtctctgttgcggggcacttagatttgttaacgaacttgttgtctagggttaatttgttgagcatgtcaatcacctgtaaactgaggaaacgaaactactcaattaccccatccttaggaattctttgtctgattgattttattgtttactctagtgctgtttactgcatcctgtcacctgttgcttagtttctgcaattctttactgttactcgacctgatactcgaccacccagttgtctggcaacagactgtgcagtcgagtatctttgttttattttctgtctgttactcgacctgtcactcgacctcacagtgggctctgcaaagagctgtgttggtcgagtgttttactgtttctgtttgattttctgtttcctgcttgttcacttaggattgctagaacacaccaaaacctgttattgcttggcttgacttagtgacttctgatcacatcttgattgttagcatcacacccatttggattgacaacctaaaatactacaacgacatgattggtgttttaggataattgactgaaaaacctattatcattaggcattcattcttcacc

SEQ ID NO: 29073 - DNA, 614 bp, Arabidopsis thaliana columbia
ccctatataaaaccaaaccattaaaatggggaatcggaaagagtgttacagcgccggaatcggccaaagcaccgggaaaatactgaaagtatgtgactaattaaatgttttataaaacttttctttatcatgcaattaagaaaaaactcttttcaattttttaaaaaagaaaacttatcaaatttaccccaaaagaagtcaatgttaagtgggcttcgataacctaaaaggggttgaaaactgaaacaagagaaagaaaaaaaaaggtttgatagttcgttaatcttttcataaaacaaaaacaaaaataaaagtaaccatagctctttaacaaaaaagaaaagaaaaggtacccatgcagtaaatcatgggcatttctttgaccaaaaaaaaagtaaatgatggggattacatcatgcgatagatattttgatgaacgtagggcgaggaaaatgtcactaagcaagtttatattcggactaccgaaaagaggaaaaaaaattagaggcaagtacgttgtgccgccgcaaatttggtcgagaagagatctggtccagaagtctggttagagtctggttaatggataaggtgtttgggtcggtgtggtgtggtgt

SEQ ID NO: 29074 - DNA, 526 bp, Arabidopsis thaliana columbia
cgtaggtaaaaatggtcattaatcaaataacttgaaatgttataacatttaagagttgacatattattacatatctagatccaaagtaaggatttatataatcttaattcacgtatcttatcagaaatatatcatcatttttaaatattaaatataaatgggtaaacaaatattactactttgagaatttatcataaactataaaagcaaaaccttaaatactcttacttataaagttacatcagaaatattgagcattttcaaatatttcataaattaatttttttttttttgttcactaattaattcgccaaatatttttgttgtttggcactatattccatttgtcaagtagcttaagtacacaccaaaactatcattaatggtcagctaaaatccaccaaaaacataactttccattaattagtttgaattttctggtcaaatttaaaaacaaccatttccatttctggtcagacgttacaaaatgtaatggacatatggccaacaactatttttattatta

SEQ ID NO: 29075 - DNA, 578 bp, Arabidopsis thaliana columbia
ccacttattattgtttttttattttaattgtttgtttatcgcactgatagtctgatacacacattcacgaactgcgtttatccctcattgccacctaataattaacttaggcttcacaacatttgtatatcccaattcatttattatatacagttgtttaccgctacatatatgtgcatagttaatctaggaaattaatgttctaagcttttatcgtagttaatattggaacaaaaatatataaccgagtaacaaaagtcgtagtaaatagttttaaatataatatttaacaaaaaaatatagtataaatataataatgccgatcgacaccaaagttataactatatatcaatccaagcctcctcattcagaaagctttcttttataaaagtgaaatattgtttagtataattagtactaaacaatggtcaaactgaatattcacaattgtgtttagtatatttcgaagtaatttatcgtgtaaataaaatattaattgtatatatcgttgtaaaatataagaggaacaaaaaaagaaatggaaatagagtaaataaatcagtgattaaggaatggga

SEQ ID NO: 29076 - DNA, 424 bp, Arabidopsis thaliana columbia
gctctctggatgtgtacgtatgtatttttccatacctaccaaacttgagatcccatcttgatcagctaaaatttgtggttttgattggtcgatatcccaaatgataatatccattagtaggtatgtaaaagatagctagagtttaattcgaacagagaatattgctttaaaaagagaataatgcttctagtgtagtaaatagatatatgatatagtcacatgctaatgaattatcaaactcaaaacgggacaaccatttatagtgaatcaaaaacacattcgagtacttttccacatgacaaattattggcaaacaaaccaacgtctcaattaggggctgggaaaaaatcggaaccaacaaccagaaccgagactgatccagaaaattggaaccgaaaccgaacccgaagatttaccttattgg

SEQ ID NO: 29077 - DNA, 468 bp, Arabidopsis thaliana columbia
aaatacatcgattgtatatttgtagtcatgttttggatgtggaataactaaaagaagttttgatgtgtgaagtgagagatgtgtgatgtgggtacataatcataatgatggcacataaaaatgcatgtcatcatcttagttacatcatcccaaaggtgtatgacattatcatacttatgtcatcactcataataatgacatccatctttatggtggaaatccaaatatttccgaagattcttcgggactgggaaaatttgggaaacttgccacttcactttttcttctatccgcgtccgtttatcagctgtgcacgcgtccacacttgacttttaatcgtggtcgtacgttatgattttctttagtgaatcgcgataaaagtaaatattgttttttctcaacgtcataatctcataagtgataattttatctcatgaaaaactatatttaataagctggaatttataa

SEQ ID NO: 29078 - DNA, 575 bp, Arabidopsis thaliana columbia
aggtgttattacatttgaggaaaaaagggtgttattacatttttttatttataataacataataactaattgacaaactgaaatgaatctataaaaagtatctccaagacgtatttttttttttttttgtcaaaggtaatgagacgtaattaaaatgcaatttctctacgacaaaaaaatgaaaaaaaaatgcaatttaattctctacgttagctgttgaacaaacgcagcaaccacgcgtagagtgcatatatttaaagaaaaatactaacctaactaatgactgcaaaagtgaaatgaacttgtacaaactttttcggtgagaattgagattgtatcttgcatacgtccaagtaatctctaatagttttcttttgttaaagagaaatgcttctaagtttgagcaaacttttaaaggcaaaatagattagtctatgtttaaattagcacgttaaagctagcgtttgatacgtttaaagaaaggtgaatacatctaaagcaaataaataaaatgttagaatgttgtcgtttccaaaatatatgactcagaactgacgcatttccttatatgtgtg

SEQ ID NO: 29079 - DNA, 851 bp, Arabidopsis thaliana columbia
  unsure (1)..(851): unsure at all n locations
attttgcattttttatttggttaagctgaaacatatcattatcaccaagcaattatatatgtaccgataacccatgctgaggaaattttctaaccaaacctttgggatcagaatatatattagtaaataatcatactttaacttagattacactaaaaactagttatcgttttagagttttttttgtctgacgagatctcggatgcttcgattacacctgacttgttagatgggatgcatgaccacattttggctaacatggcgtgcaaacgatgacgtggaggcaactgattggctccactgattcccacaaatttgttgcaaaatcaaaagtagggccagactaattatattatttttttgtggatgtctataatatgaaatttgaatcaatacgtaatttatcgattctttgtctaatcgatgtcaactaaatttaacaaattatctggaagtcactcaacattttccttgataatgctagtttcttcgaatcttaaatgaggcaacgcattgtccattgaaattttaagcatatagtgtatatatgtatttatttttctagcaaattcaaaacggcctgggatcgtttggtttgtaatcaatatatgggttttttttggtcaacaatcaataattagtatttttgagaattcatgaaatactggatgagtaaatgagataatttttatggatgacactagcacatggttgctaccagtgaagcactanaaaatcctgcaaaaaagtttgtaacaatttcgttgagctaagcacatttatgctaatttgagaaatataattgcgatccatgaattcacctaattgcgagtcctagatttgtttagagt

SEQ ID NO: 29080 - DNA, 580 bp, Arabidopsis thaliana columbia
ccatgccttcttgaacagatcgtcaaactgaatagacaacttgctctggacgtattcacaatgcgaggccagtaaaaaagagtttattaccacaattaaatgtaaaataatttatgtacaccagtgacattgatctacagaccgaattttcatctgaagcattgccatgtgaactatgatcctcataaacgctccatgtttggggatatggctagagagtataaaagaaaagaggaagaaacaatcaacactgaatcgtaaataaatttatgaaattacagaattagatagtgatatcataggatagcataccatcagatctccaagatctaaactctgcttaaaactaggaggaacagtttgagcaggacccccattgagcaattcctgtacccattggccactagagacaccctctggaaggactctctctgaagactgtgaatctccaagccacctggacggaaagggcgattgttgacacttctctcagaaaatccttcggaggtcctaccattcgtggaaaaaatccagaatcttgatcccatacatttgttctgcaaatcccctaacataatat

SEQ ID NO: 29081 - DNA, 469 bp, Arabidopsis thaliana columbia
tggaatgtctgtagacaaatttgtttacccacttgtgtgctcttatgttccaagtttagtgcatttttgattagtatattctacaaaacctgtaatctgtttcttgcatatttatacccttgttttttctcttttatcatgttgattgaacaagattattaactctccacaactaggattctcttattgctctgatcatgtcagtatctgtataaaagtgtccaagccattgtgttcctttttaacagagaacgcaactaccgacttctcacaacatatcaaatgccaaatgtgaactaatgtaaccaaacaatgttttttggataattcacattgcacaaatgcttgtatctgtagtttcaattttcttaaagggtgttttggacatttcgatctttttttttgatatggtaaataaaattacaaacaattatatttttccgagaaagccattgtttcagttgatgat

SEQ ID NO: 29082 - DNA, 514 bp, Arabidopsis thaliana columbia
cctaaaatattcataaatggtaagttaatacaacagaaaagtcgatgatactatctttttgaataggtagatttaccgaacgaataccacattaccacggcttaaaaaaaaaaaaagaaaaaagggaggattagtctcaaacattcttaatcaatttcaaaaactggataaataaaagcaaaagtttcaaaaacataattattcttgcaacagtaattgatgcaaaatatatattaaactgtcaaataatatttcgagaacgaaattgtatatataaacttgctgttaatttggttaaaatcgggcagtaaaataattcacagcaagttttactacgcttgtaaacaaaactgcattcacactctgacagtcataaggtatacacaaaatcatagaatcatggacatattttgtaacacatatattgacaatttgacattacgtaaatgcaattataactggaatgtaatttccggtttccagtcaacatacaaaaccagctttcggtttaata

SEQ ID NO: 29083 - DNA, 575 bp, Arabidopsis thaliana columbia
gtggactcttgaagtcaaggaacagtgttatcagataggggtttcctatttattctggagaggctacttatgcgctccaagttcttactagacgagaatgagacccaacgatcaactggtggagttgctactcaggaccataaagacaaacgactagagaaagcaaatgctgttatagacataatgagcagtgctttgtctttgatggcacaaataaatgaaactgaccggattaacatcttaaaggtacattccttagaacctttctgtttgtcaaatatcctaccagaagccactctaaagcttgctgatatatatagtaactgctgttctatatgtcgaataattggcgtagaagataactctgtctatacctcttattggaattttccccagatgaagttaaatttcacttgtgtctttctctgttgtttcaagcagatgtgtgacattcttttctcgcaattgtgcttgaaagttttgtctactgacgaggatgcagtcccaattctgcggataggaatagcaaatttgatcttctcatcgaacagctataaagaagtgtggatgaaggt

SEQ ID NO: 29084 - DNA, 527 bp, Arabidopsis thaliana columbia
  unsure (1)..(527): unsure at all n locations
tgcagattgcagctacttcaggtaatgatactttcatttctttgtaagttcaaacttacacttaaatacaaacttagtcgaggaagatattctagtttgggttggtggggaaataattgttagaactggctttttttatcaggggaacaagcttgcaaatcctacagatgcttaccttggaatcaagaaactaacagccaatgcttttgctcagaaggtacgcttgttggtagagttatttattataatgatgttcactgtatccaatatctcttttatactatggagtctctaattttatttaaagatcttgatggataattttgtttacagcttctcgcttcatcaccaaaagtgctacctgtacacgcatatgatacatccaatccaaactcaaacttgatctggttagagaactggtcagcctcatgcttctggaaaccagttcctcaaccgaaganaacgataagcagaaaacctcagaacaggcttttagtcgaggctgagtctgctaacccaagaagagt

SEQ ID NO: 29085 - DNA, 525 bp, Arabidopsis thaliana columbia
gtttataaaataatttttttttgatgataatgccatggtaacaagtcatagtgtggatgtgaatatatgaagatgattattttatctccgtcagctacaaatgatctcagacattttgtacttatgttcaacttggttttgtgttcagaggttaaaaaatgggcacaagtttctattcagacacatacacacataaataaaatagagaattcactgttaaagttagttgacacaatagtaaatgcgatacatgctagagtcacggaagaggcaaaaacaaactccaaagagagacatataagaaaaagacaaaaacccttaagaagcttatcacattcttaaagcacgaaaattcagaataagattcagtcatcctttagcacaaaaaaggtaaaaaaaagatccagtcatccaatactagttccccagaaataaaggtggtatatttttttttttgagaagcctatccagtaccaacctcaattctctaggttagatatagtctgggtagtatatatgtttctt

SEQ ID NO: 29086 - DNA, 668 bp, Arabidopsis thaliana columbia
tattgagcatgtcaatcacctgtaaactgagaaaacgaaactactcaattatcccatccttaggaattctttatctgattgattttattgtttactctactgctgtgtactgcatactgtcatctgttgcttagtttctgcaattctttactgttactcgacctggtactcgaccacccagttgtctggcaacagactgtgcagtcgagcatccctgtttcattttctgtctgttactcgacctgtcactcgacctcacccagtgctctacaaggagctgtgttggtcgagtgttttgctgtttctgtttgattctctgttttctgcatgttcacttaggactgctagaatacaccaaaacctgctattgcttggcttgacttagtgacttctgatcacatcttgattgttagcatcacacccatttggattgacaacctaaaatactacaacgacatgattggtgttttaggataattgacttaaaaacttattatcaaatattgttcgtgagatggcaggaaagaatgtaagttcttctctcacttatctatgttgaattagctgtagatagttaaatatgactacaagtattctaattaattttttattagaaaaactctacttggacttctaactcggaggtcaatgatgttagcaaaggagta

SEQ ID NO: 29087 - DNA, 309 bp, Arabidopsis thaliana columbia
gacaaccatacagtcacactctctcgcctttcaaactaatattaggcgaagtgagctctatttatatcccgcccaaggtcggccagactgcactgcctggttgccttatgtccggacagctgtgacgccaacaagcgatagttgtctcgggtgatggcgtgacgactggtggcgatgggtgtcactccaccacctcagcagcttcggctccaagacccaggcgacttcggctccaagattgattacttgagccgcaaggacccgggtgtgaggtgtcctacccatgtcggttccgcggacggcggggca

SEQ ID NO: 29088 - DNA, 782 bp, Arabidopsis thaliana columbia
gccagtgtgctctaaaggctgcataaggggcatgatgacttgacgtcatcctcaccttcctccggcttatcaccggcagtctgttcagggttccaaactcaacggtggcaactaaacacgagggttgcgctcgttgcgggacttaacccaacaccttacggcacgagctgacgacagccatgcaccacctgtgtccgcgttcccgaagcacccctctctttcaagaggattcgcggcatgtcaagccctggtaaggttcttcgctttgcatcgaattaaaccacatgctccaccgcttgtgcggcccccgtcaattcctttgagtttcattcttgcgaacgtactccccaggcgggatacttaacgcgttactacagcactgcacgggtcgatacgcacagcgcctagtatccatcgtttacggctaggactactggggtatctaatcccattcgctcccctagctttcgtctctcagtgtcagtgtcggcccagcagagtgctttcgccgttggtgttctttccgatctctacgcatttcaccgctccaccggaaattccctctgcccctaccgtactcaagcttggtagtttcaccgcctgtccagggttgagccctgggatttgacgcctgacttataagccacgttgcaaggtctagctccttgtgttccggaatattcatatgtaggaatggaattagatcttctactaatcttgagttaatgcctgatgaattccagacaaaaatgggttgttgtttcgtcttttagcccttttgg

SEQ ID NO: 29089 - DNA, 532 bp, Arabidopsis thaliana columbia
gtgttcagttccttccatttttgactcagagctgatcatgtgataggtaatgttgcccatgattttggtgatgaaaattgtgaggaccagtggaatccagcatacagtttctcagaaaccacatcaagcttttcgccagagataaaccgtaagaagctacagaatgttgagcacttggttcaaaagctcagacgattgaactctagccatgatgaagccagccaagattatattgcatcgctctgtgagaacgcagatcctaccaccgatcatagatacatttctgagattctattagcctcgggtcttctcctaagagaccttggctcaggattgacaacgtttcaacttcacccttctggccacccaatcaatcctgagctgttctttgttcttgagcagacaaagggaagcagcactacgcatctgttacacaaagaagaaagtaaggttctgaaaaatgagaagctcaaccggaaacttgtgtttgatctcgttaatgagattctggtggagaactagcgtcagttga

SEQ ID NO: 29090 - DNA, 613 bp, Arabidopsis thaliana columbia
ctcctccttctaattccgctgtagactatccatcaggtgactcagaccatgtctcaaagcgaaccagacctatgggaatctctgacgaggtgagaaaaatcttaattaatattatatattttcttatcaataccaattttacataattggtagtactagtttagactttaaacgtatttcttctttctccccatatgtaggtgagtctaggtgtgaacatgttaccaatgacattcccggggcaggctcatggtcataatcaaaccttcaaagcacctgatgacttgcccaagacagttgcacgaactttgagccaaggctcatctcccatgagcatggatttccatcctattaaacagactctgctactaggtctgtttcttggtctgtatgcatatttcatgtaacatacatcatcagaaattttgtaaaaccagaagtttcttgcttcaattttctttgttccagttggtacgaatgtaggggatattgggctctgggaagtcggttctcgagaacgtctagtccagaagactttcaaagtttgggacttgagtaaatgttcgatgcccttgcaggtgtcttcttttgtgaaaatcaccagaatattaat

SEQ ID NO: 29091 - DNA, 530 bp, Arabidopsis thaliana columbia
tagaagcagggtctgtttaattggatggaaatccatgctcatgggagatgagccctgactcaaagttctcgcaactgtcttgggcaagtcgtcaggtgctttgaaagccggagaatgaccatgggcctgccctgaaaatgacatcggtaacatgttcacgcctagattcacctcgtcagagattcccattggtcttgttctttttgagacatgttcagaatctgctgacgggtagtctaaagaagcattagttggaggagttctcgggtgcttcaacgccgctataccaaagataggaaaggagttccattgtaagcaaattgcatagatcacacaaagtgtgtctgaagaaacatacacatttgataagcaagtagtacctgggattgatggaccccaagtgcaatggctcctgctgagacagctggatgtgggacagaggatggactagacatccaaccagcaagaggtgttggaacaggtgacgccgttggttgaaatggctggaacatagagacaacaaacacttg

SEQ ID NO: 29092 - DNA, 959 bp, Arabidopsis thaliana columbia
  unsure (1)..(959): unsure at all n locations
tccatgaagattttcttcgagattaggaagcagaagtatctcgaggccttggataggtaacttgtgtctctcaacaacaacaagaatcaaatgttttcatattgccaatcaatcacacctgctgctgcttctatctaggcatgatcgtcccaaggctgtcgatattttagtcaaagatttgaaagtgttttccacttttaatgaggagcttttcaaggaaatcactcagctcttgaccttagaaaacttcagggagaacgagcagttatccaagtatggggacacaaagtccgccagagctatcatgttggtggaactcaagaagttgattgaagctaatcctttattccgtgataaattgcagtttcctacccttagaacttcacgcctcaggactctgattaatcagaggtattctttgtcctttcttgttcacttcaacaaattttcttcttgtcagctactttaactccttgtttctatgtggctacataaacctgcagcttaaattggcaacaccagctttgtaagaacccaaggcctaatcctgatattaagactctctttgtcgatcattcctgccgcctaccaaatgatgcacgagcaccatcccctgtcaacaatccgcttcttggatcattaccaaaagccgagggatttcctcctctaggcgcacacggggtaggtcaatttccacctgatttttcgtattttctataagtgccatttctactgcttttggttctagctctatagttacctttacatgccgtgcttgacttacctttatgtctttagccttttcaaccaacaccttctccggttccgacacctcttgctggttggatgtctagtccttctctgtacacatccagctgtgtctggaggaccattgctcttggtgacnatcatccaaggttatttgcttacaaatgtggtgttctttataaagctgtgtg

SEQ ID NO: 29093 - DNA, 457 bp, Arabidopsis thaliana columbia
attcctccaacactatctctagactagtgtaaatcgatacgtgtgagaagatggtggacattccaaaaagtaaaaatcaatgataatggggtttgtatgtctattagcgattataataatgtggtgcccaacaaaacttagagttactagataaattgatatcgatgcgacacattaaattgtgtagagcatttatgacatgcaataatatggcatataactcaagtataacaaaactgaatccacatgactaattttggtattatatataactcgtgtagatcccctcctcaaaaaaagaaaagtaaatagaaattcaacacacgttactcttaaaagttaagagaatctagaatccctctctccctcgccccctctccccctcaccaccagctcgcataagttttcttgccccatactcatatggaagaagaaggttatcagtgggcaagaaggt

SEQ ID NO: 29094 - DNA, 530 bp, Arabidopsis thaliana columbia
tgaattagaagcttaatttgcagctttggtttatttagcaaaaccagacggtggtggtaagtggtaaccatttcgtgagtgggcgcgtgacgttacgaaccaaaaaaaaaatcgcgtggttggagacagctcaggctagtctggacaagtgtcgtttaagcatgaaagttagcgttcttctgttacaatcgccgatctgctaattgtaggcgtacgatcatttctggtccattcacgtggccgtgtctagtctgtattgtacgttgcatttaaactctagttacgcctatacaaaatttaagcaacgtatttggttaataacttaatactccttcattcttctaagtaagtaattttatagctttagaatgttaattattctcttagttttcctttaattatacaacttcaactttgaatggcaaaatataacaacaataaagacatactagacattttgtaactatgtgtaagatgttaaccatcaatattttagtaatcaatatgtgtttacatttttttttatatga

SEQ ID NO: 29095 - DNA, 545 bp, Arabidopsis thaliana columbia
ttttgtatttatagcttgcatctaatgccctcagtcatcactttgttctatgcatattaatgatagaaattgcttgattaattactattgcaggtttcgaggatttttctggaaggctgctagaataggtaggccttttcacccctttggagctcagttatctcttgtgatttcaaaacctttctaaaaacattgtgttgaacaatatttctttgcatgtgttctatagaaagtagtgataggctttctaggagcaagaactcgttactaatcaatgcagctactaacaattgtactataaattcaactcatgaataccagattctaatgctttaaaacccatggtcgatctcctatttaagcatatgcatgatggcatatagttaagtctatatcctcctacttttactgccatttgttttccatcgccgaacattctgttgcttaactttgctttgtcatcacttgtaccaggtgagcgtttgagccctcgggtctccgctggatgcttcatgatgggtgtgtcgatcattttcttttgagtg

SEQ ID NO: 29096 - DNA, 390 bp, Arabidopsis thaliana columbia
gaattaaattatgtgtattgttgttgtgcaatcaaatccacatgtttacattgttttcatcgaactcatgtggcttctctattgtataacaaccaatgttaatttaacacgtgttacttaacgactggattggcacgtgtacgtatatgatttgtggattatcactgggtttgcttaaccacctggaccaacctaattacgttaactgtgagatttgaggtttccaccgatctaggagttgatgggcctcaagtgtcttggcccagtaattaatagatcagtattatccagtaagcaaattttcgtcaaaaaagaacttttttttttctccacaaagaacaaatgttcataagcgaaatataaacggaactaaagcatttacattgagtc

SEQ ID NO: 29097 - DNA, 510 bp, Arabidopsis thaliana columbia
aacttgttcatgaaattctattgcaaagactagaaatgagaaccaatttaatgaaattctaactcagattcgaagcagagattttagtatgttacctcaaatgggctacttctctcaacaaaatcctcagacttaacagacctgcactttagagctcgagctgaatatgccctaatggaatgatcaaacctcaaattcagagaaattggatctctttctgtcaaagagctagcgagtttttgtgttggtgaaggagacatcttcgaggataatcggaaactccatgaggaatccaacatcgaaacccccattttctgattctcacttccttcaactgggtacccaacaaaactactctcaggctctctcaaattgtcaatttaagatcttgacagacaaaaagattatatttttatctccgttcaacttcaccggtagctccatgactatgccccactccaaagcatagggcttttatcattaactaatagaatcattacacgtggattt

SEQ ID NO: 29098 - DNA, 676 bp, Arabidopsis thaliana columbia
ccagtgtgctctaaagcaaaaaaaaaaaatggagcaaactttcatcacgtggaaaacttgtctttcttttttttaatacatatttgaaggtttaaaagagttagacaggatgtgttagcgacaatgttttcgaatgtaatgaaaaataatctttaagaacaagtggttatgtacaaatttatgcgaatagatgataaagtagatacaacaaaaatgattgagtagcaagagatggagaaagagaactttgctctattaaaaaatgtgtttgagatcattttatcaatttttgaagtaattggctacatcgaataatttatgtacttatatatagtttctatatcaattcatatacttgatatatatattataaaaaataaaatccttaaaactacaatttttgtttagaaaatgtgttgtgtatatcttcaacatgagagaatgcatcaaagtggtgtgatcaaactcttttaatccaaatctaacaaatatattagggttttgtgccaacaaccctcaaaaatatttttttttgcaacataacctttcatattaaatacatgtaggtcaatactctgatatcaaaagtcacccacagtataaccacgtgcatagattttatataatctttgggcgtgcttagattttgcaaccgtataagtatgtatataagtta

SEQ ID NO: 29099 - DNA, 472 bp, Arabidopsis thaliana columbia
gggtttacacaaagaagaaacagaggaaagacaagtcataccaaaaacagaatacggaaatttgataacaagagggtccctgcctcatcggtgttaatgagaataactccacaagcctgaaatcaaagccataaagaacaaacacaacttcaattaaagaccaaaacacaagcagccctccacaatacaattatgatggacaagttccaacaaacagaaattgatttcttgctaaattccaagaaacctgagtgatgcattccaataaactctcaaatacaaagcacaaagcttagaaaacagtgagaattagaagaaattttgaattcgaaacatccaattttgaccaaatctaatgacatacctcgaagatgatcctctcagattccagcaagcaatccaaattcgaatacgagcctgaccatgaagctgactgaaccaaaccaatcaaaagagaacaagtaaacattag

SEQ ID NO: 29100 - DNA, 532 bp, Arabidopsis thaliana columbia
  unsure (1)..(532): unsure at all n locations
ggaaaagaaaactttggaaaatggttgttaacctcattagagctcgtctgtgattagtgttgttagatttacgatacaatgccttatgtgtaattgtaacatgtgtaagtgtcacgtcatctacgcaagtgtgtagaatctggtaggcattgagccaggctttgaagtgtatatatccttcttatttacattgaaccctaaaaacctggattcttgtggatagtcattcgtttgactgcagattatatttaatggccatggagatttaagactgccatggagacttaagtattgataacaaacaatgtggataaaacgcattattcaatacaagaaattctcatgctatttatgtaatcatcgtcgaacagaattagtaagaaagcacatgaaaaattttgaaaaacaataaggaaatgtatggagtgcgtattttacgctttagtgagtgaaaattgggaggaacaagacataatacatcaaaagggtaagaanatgccacaatctgctagctttgcgttctaatactgat

SEQ ID NO: 29101 - DNA, 128 bp, Arabidopsis thaliana columbia
cctgacgtgaaacacatcgtcgctgcggtagttctgtgttcaacgatgagcgccgcgcgacctgttcatgtgggccgcccgagccagcccaccaggctgtgcggcgatcctggtcgaccgcggacacg

SEQ ID NO: 29102 - DNA, 414 bp, Arabidopsis thaliana columbia
ggtgaaattcttggatttatgtgtaagggttcagtgttttatgtatctttcaaattgtgcttctagtgtatccattttggatttgtgaaagttgtttatggcttatatatctaaaattgtaaaacctattttaaattaatattacaaaacagtttcggacttttaactcataatatctcttcgaatttagttcattttccaactttgaaattcgttggcttgtgatcttgaagccttgttccgtccggaatttatgttacttagtcaccagtagagttacaaacgatgagttattttaatcttttttctaaaaggtccttgacaatggtttgacgagaataaatcgtatttcctgtttgcagatccatgactacgactaggcggaaaaatacacattggtgtcatacttgtaga

SEQ ID NO: 29103 - DNA, 583 bp, Arabidopsis thaliana columbia
agagcgcccacacctacccatctttttccatgtctggttttctaataatatacggcaatttaattctttattgtattcgattacgatatttccaaatctcttatctaaatgtattttggaggagaacattatttaaattaaaacccgtatctatgttgaggcatgttgcccaagatctcccatgcggctaagaaataatttagtcgtaacagattgtattagtactttagatttttcttaaacaagataacttattcgttgagacataaattctgtcttaaatcagaaatcataataatttttgtatatgataaagtatttcaatctatagtctttgaatcacacgaggaaatgtttattttttatattaaagtattagttttgtcaaaaataacaaaatggaatgatgatatatatagttttgcatacaaaagtacctaattctgtaaatttttgtaacggcataattaaaaaaattcagttgatgattctattagtttaactacacatacttatatgatttatcaatttgtaaatcagaactttataaacttccaaagttcaaagcatgcattaaaaattt

SEQ ID NO: 29104 - DNA, 324 bp, Arabidopsis thaliana columbia
tgatcgagttgatgagaaaatcatttcaacaaactttctctaacaaactctctcgttctctcattcgtaatatggtatcagagctatcaagctcagatctccatagattttgatctgatttctatgtttttgagctcaatacgttctctacaatggtaactcgttcgaagtcttgaacgagtatttcagctcgtcaaagttcacgatctactgatattgtcgtttctgtttcaatcaagtacttctggaacttcacgagctcacaattcaacgggtatttcatatcaggactagcaattaatggcatgtataggattagacagc

SEQ ID NO: 29105 - DNA, 392 bp, Arabidopsis thaliana columbia
caaaacaagacaatggagaagaaaaagaagaagccaacaaagtgttgtcttctaatgtgttttggaaataagagaagcaagaacacaaagattgagcctatggcgataccaaactggcaatatcgaggagtaggaaatgaaaatggcaatgccaggcctttcattaacgcggcaatgtcacctccaatggtgtatcctcctccacaagcagtgcctggcttcacaacacccataccataccctcctcctagtttttttccaggaagactcaccaccaccatacactggtgctggtatgttccgagtcagctccaccacgaatcccaccatattttccagttcccaaccctaggctgcattacccgcaccattgatacagttctttcagacga

SEQ ID NO: 29106 - DNA, 564 bp, Arabidopsis thaliana columbia
ttcttatttatctattttgttctaattttatttatgctctctgtctttatttaattttttgatcgtctggtgttatcttgttttcatttttctatctagtctacaaacgaatagccgaaggtagtcgttgataaaccaaagcgaaatcaaacttaatccaaagagaaatatattaaaagaaacaattctctgtttaacattgaatcaaatcaactgtctgtatgtataccatagtccttaaagaagccagttctacaaaatcaaccacttcatcctcctgatgaatcgtcattatgggttattggtacagaagccaacaaagtatcggctgtgatcaaaaggctcaaagaaaagatattgttcttgcattggcagttgctagtccatgaccatgagaagtgagaactgacagattctgaacggctctaatccaatccacaccaccaatggagtggaggattcccgggctcgttagggtagttctgtcatttgacagacaggtggcatgttgctccaagaacaagacccaactcctgaggatgccccaacactcatattcatata

SEQ ID NO: 29107 - DNA, 637 bp, Arabidopsis thaliana columbia
gtgctgccacgtaggatgcttatctcacttatctcagtccactaaaaagcaaagcaagaaaaagagaatgtcaaaggagaaacaaggaagaagcttagcttataatcgaatctaagccgtttcgggaaattctgtttgtaggtgacaaaatcctcttatagggttattcttagctatgaatttcctctgcaatttctttttttccccgccaaaatttctcctgaagcaaatgtagctttttacttgctgaactagggttttgttcgattttgttcctctttcctcgctgattttgtcggaatttctgggtttgggaagagaaattggagtcgttattgattgaaatgaagaagcttttaggaggtccgggaactgtgtgtggtctgttactgagaatcggacaatgtgcttcagctgctgcttcaatcggcgttatggtctctgctaaagagttctctgttcacactgctttttggtacggtttcgctttcttcaagttttgatttgtttcctttaaccttgttttgttcgtttagttgtcggatttagtagaaatggtagtggaatttctgcaagcaattttggtgtttattagtagtagtacaagtctcgttgatgttgattatgattttggggt

SEQ ID NO: 29108 - DNA, 622 bp, Arabidopsis thaliana columbia
atctttctaattacacacatccatttgcactcttgttcttagcaaaacaaaattgttctaatctttagccaaaaccagacctaaatcaaaccagcacaaaatctcagttatatcagaaaaagcagaaccaacatatagtttgtttcatacacaatgtcgaacgttaaagaatctgaaactgttcactttttgtttagtgattgttgattgtcacatcaaacaacttacaaaggatcactttgattcaggtacaaagtcatttccatcaaaagaaccaaaaaaaaaaagaagcaatcacagagataagtagtaaatcactcatcggacaattgatcccaaacattgacgatgagccacccttcaatggctgcagcctcaagttgttcttcaggacctgccttctcccatttggcctcaatcgaatccagctggcccaaatcagaccacaatactctgtgcgctaattctcttgtcccaagaaactcaagcaccagagttccacgagcttccgcagccaatttcccaacgttaatcgcgtttcttatcacgagaccgtggttttctctaagcaagtccaggtcttcctcgatctgcactcctacaaaagtgacaaacttggaag

SEQ ID NO: 29109 - DNA, 576 bp, Arabidopsis thaliana columbia
gagtgctggtagttcttctgccatcgaaggctgacgaacaacaataaagcttgatgccactagggttaagcgtttagaaacattttccctaaaggagaggattgatgaaaaaagtctctccttcgaagaggaggaaagaagaattggtctctcaatatatgaggaagaacatctcatatatgaggaaagtttctccaaaaaaggagaaaaatctctccaaattgtaggaaagtaacaaagaagactcgttaaaatcacaaagataaccggtaaaagtaatagaagcaaagagcaaacgttaccatgacatgactcatggtccaaatataatgggtctcgaggtacaaaggaagccataaacattggcccagctcaaaaatcatgacggcacgattggtgagcatagcagcaaacaagccatcgccggaaaagataggcaagaaggcggcgatggcatggaggtggtgggcacatcttcaatctctgggatactcatcggagaaggaggtaaaaggaccaaaaaagtgacagctatagatcttggaggaatatgggtgatgggtggtggtggcaatg

SEQ ID NO: 29110 - DNA, 508 bp, Arabidopsis thaliana columbia
cgtcgaccaggaacaatacctgtcccactgtgacaacaagtcctgatgttggatctacagccacatcatagatcgttccatgagagagagtttgagtatgagaaggtgaaagacgcacactacttgcttttctgttaacgtcaaacatctgcaacctgcgacaatatcaacaattatgtcataaatttctccaaagtaaatttgcaagtttcgaggtcttgcagcatataaaacattacctatctgcaccagaagttaacattttccggccattgcatgcgaatttaacagaagttacagcagctgaaccacaaacactcccaacgggatcaaagttcctgacaatgagaaaatataagtttgtatggccttgcgatggaaatcaaaagaccataacagaggttttgtttttacaccttttgacatcataaatgtgaattgcgcggccctttccccagaagcaagcaagcttgaggcattttcagaatcaacgtttgtcagtacagga

SEQ ID NO: 29111 - DNA, 689 bp, Arabidopsis thaliana columbia
atctatgcttgcaggatttgatatctcaagtttccaccgaatcagaccctattgcacttctcgctaaagttgtctccctcctttttattaaggtacatacatatccacgttcgtgtaactatattctgtgctcaaaattcagattaatttatggttggaaaattgtcgacagattcacaataaagctttacaagcccctggtagagccattgctgcggctatttcacacttgaaggtataacataacaacttaggagattcacaataaccgtatcatcttttctctcgagcattcctattttttcgggtgtctggtcactctgtattatatcttagttttctttttctgtggctaacacgtctattttaaaccatgtaggaaaaacttgatgaatctgcgtacaagactctgacagattaccaaacagcaactgtaactcttcttgctctaatgtcagcttcatccggcgaggttcatatccttctcttattttgtgggctacaaatgttcatttgaaatgaaaccaattaaatctgtagtgaatgatatcttaaaactattccatcaacatgaacaggaacatgatttccgcagacagaatcttgaccaaacgggaacttctcgagagccagatgccattgcttagaaccctcgtccttggtgactcgcaaccacaacaatcctaatc

SEQ ID NO: 29112 - DNA, 634 bp, Arabidopsis thaliana columbia
tattattgatcattcaatggttttggcccataggcacataggcgcattataacacaaaagccccttctaagtctatgcatttggcgtgaacatgaaaaaatgtgtataaactgaaatgtgacttaattattaatcaagtaagtaacatatgtaaacatgtcaaaaaaatcaaacaatcctttaatgaccagaaacataaaaagctagtcgttactcgttacaaattaataaaccattaaaaggctacttcgttaaagcttttcttcttcattacaagaaaaagaaaatggagaaagcaattctcataacgtttctcatagccaccacatcgatggtttatcaaactattggtcaagaagaagagatcagtccaatatctcctgaatcattggcatacgaacccgctgcagcttacgagtacgaccacgaactcctaagccacatgacgacccggcgcatcaaatttctccaagattgttcggataaaatgagctcgaaatgcaatgttgagatgacggaaggattgatcgacgacaagcccgtttcggaggattgttgtgtgactttttgaagattggaagagaatgtcacgaaggattgatgcttttgtgtcgcacttatgagctaaagatgt

SEQ ID NO: 29113 - DNA, 623 bp, Arabidopsis thaliana columbia
cattttgttcttaaaatcaactttttgtttgaaatgtgatgttgaatttgagtttctgcattgttggttttgggaattatgttgcagattgatatcttgaagcgattacaaagagaaacattctcggatttgatgaaacttagagaaagacaagagaaagtagagcggatcatttcctcgcagaaattatcgaaaggaggtccctttcaagagactagcactcatgtgagaggtgaagttgatgtgcttggagctatattgctgatgggaaacactgacgaggaaagtttcaatggactcaacaaagaaggagtgagaccgggattgctttcaaggtttgtgtttgaaacgagtcttagggagacagataggcttgtggctgagcttgttgctggatacaatggggcaggaagtcacagggattttttaggaggagagttgtctttagccaaagtcttctacaaggcagatattaatgattggttctctgctattgctattcctgttggcgcgcatttcagagacattgaggcttctactgtgtcttcttaccaggtatccaccaatcgttgcagatttctgtttctatatttgttgtgtttctcataaataatcgttattga

SEQ ID NO: 29114 - DNA, 711 bp, Arabidopsis thaliana columbia
  unsure (1)..(711): unsure at all n locations
tgtagctataagtcctctggtagagatcacaaaggagtagaaccgaggaagagcagaagaacgcattcaaaccgggaatccactacaggtttatcgtcagaaatgggaaactctgcggggtcacttttccgggataaagagactcagaagagagcaggggagatacatgcaaaggaagcaagagaaagagctaaagaatgtgttgagaagttagatggggatgagaagatcattggcgattcggaagctggtcttacttctgaaaagcaggagttcagcaacatttttctccttcgatcaagaaaacagtcccgaagcactctttccggtgagcctcaaatctcaagggaggttaaccgctctctagacttttccgacggaatcaatagctctttcggattgagatctcaaattcctagttcctgtccactctctttcgacttagagagagattctgaagatatgatgttgcctcttggtactgatctttctggtaaaagaggtgggaaaaggcattcaaagacaacttcaaggatatttgatcgagaatttcctgaagatgaatccagaaaggagagacaccttcaccaagcaagcgatttagttttagttttggtcgtctcagccgaaatttcagcctgaaagatatttcagccggccaacctttgagtcttctgaggatcnctatatgtctggtctatgagatttgat

SEQ ID NO: 29115 - DNA, 869 bp, Arabidopsis thaliana columbia
aggaacatatgattgacaaattatattccattaacattattatgataaatcgagtaataagatgacaaaaaaaagtttagcaaatgtaattcactattgatagattataatgttattattattgtggttttactgttcattatattttgtaatacaaaattattacacacaaaaataaattttacaaaagtaaaacaaaaaataatacacagttcacacagtaacgaataagaacgactccaatgaaaagacgaaaaccccggatgtgataatttttcatatttcttcttcaaacagctaagaagcccgacccgtatccgaatccgtttcggttctgtattgttgttgttcttctacaccaggaacaaccataccagtgtgatgctgatacatttgaaccggaccgggtgttttcattccataataacccgtccggttcattccatcaactgccatcataaccggcctaaccgttccaccatatacttgacccggaccagccatctgatgagtctgaggttggtggtatcccattggtacatgatggtattgttgaagatactgacccggcatttgaaccggttgtaccatatgattacccggttgaaccatatgatttccttgctggaccatatgattacccggaaccgaaccaggaacgtaataaaccggtgattggtgaatggtatgaccctggtaatgaacctgttggcctgggccaggggcatattgccattgcgagttaaccgggagattactctgttgcattacttgttccggttgaggattggatttcggagtcgaaaccggttctggactttccggtttaataaaaactggtggtggaagttccggtgtagatattcgca

SEQ ID NO: 29116 - DNA, 606 bp, Arabidopsis thaliana columbia
aaaagaaatgaatttaacttgttgtagatcctgcttctcgaacatatagagccttcgaacttaaacttccatatattccaaagaaataaaaaacccacgttatttgtgtaaaatttttacatctcacaacctttattttccgataaaattgtgattttttaatatatattgacatggaatattcttttgattatgcaggtgatcagagcatcgagtcaataatccttaatgttcaataatccaatcagccgcacgtaataggagaagaaatctatttgtttttaaggccgcctatgatctatatatatgaactacccacacctgttttaactaacaaaatctaaagttttctcaactagccaaaaaaaaccctaaaaggctctgatccaatttcatccgtcaaaaatcttataataaatgaactatcttaggttgaccaacgtatcttctttgatcaccttgataagagaaagatttggttcaatcggtgccttcggctttgccttcaagttcgacagcaccacacagtatctgttgatgtcaccctgcgactgcagcacagctaaagcaagtacatgtattgtagaaacaatgctaagtttttag

SEQ ID NO: 29117 - DNA, 2418 bp, Arabidopsis thaliana columbia
aatataggagagaaagtacagaccattcaccactatgataaaaatggcatgccagaaaggtggtatggactttggaggcagcatgattaagggatacaagaggtcatccttccgaaaccaccaataaacaccaacaacatgggccgtaaatgctacagagattccaattaatgccgagatatgcctctcaccctgaaatcattaaaagagacttaagactgacccatttgaacattgaatgggaaaagaaacaagtaaaagcaaaagaaaaccttcaaagctgtttgcttcttgagaatatcatttgacttgaacatgacagcagcaatccaaatggcgacaaagaaccctgagagagagatagcaggaggaaaagtcaaatagcaggaggaaatcatcagaaaagacacgagagagagagatatgaaatagtaccctgcaaatgctggcggataaaaacaaccaacagaagcaaagaaaagggaagaatttgctcaatccagcgtgcagcctgctgaatatcatatctttggtaaggcgaatcccgggaagcggcgtctccagcagcaggatcacctggagcagcctgagaggcaccttctgaagcacctcccatgggatcaacctgagtagcagaagaacccaagagttcagagtgtccgggttccctcagagcattggtatcagtttcagcatcctgctcggtgttgccaatgatcctaatggcaacctccccattggagagtcctgaagaatcatcactaacaagcgtctcagcctcatgactaggacttggcctagctcgaaagagacccgaatactctaacaaggtagaaataggggcctggatgatgttagaagcagagaggtggagtttctacgagggaacccctaaatgaatcatgactggcgccgggcgtttccatttaagaaaaccctaaaagcatatatgaagatgattagctaacagtggtggaaagaaaacgcgttttccaaaaaacaaaaaaaaagagtacctgcaacgacgagaagcaatagaagaaagcttagggtgaaatcaaaatcgtatttagctcatatcgtgtaagaaaccctaaaggcaatgaataagaggggaaatgaatgaagaagaagaagaatagagtcaaaaagggtagaggcgatcgccaagactaggatcgagccacggagtctttcctaaaaagggattgagctaaacggaacccaggggaagaagacaaaggagatccggcgagctgcggaaagagagagagagaggggacggaattgtcttgtctcgtctgtgtgtgaatcaaatcaacggttgagagttttttagttggacgaattgcattgtggatttaatccaaagggttggttgacttaaaggaagcgacgacagtcttctctaaatgggcagcctattaaatacattatgggccttataacctaaatgggctttaatgcaagcctactaaaataacatgcgtgactacagcccccagccattggggaggaataaaatatctctctctctctctgagactctgactgagaagaaagaaagaagttgactgacatgagaagaaagggacaagagcgcgtctcgaaacgccgtcaatgttgggttgctgatactaataaatgcaggctaatggctaaaggggtttctttctttctactttctactttactattggtcaaaaaggctcacacacacgagggtacttgtggagcaggtaggtagagtcaacccagttccgaattatgaccacggaagaaggtttaagctttttaaaatggcagacaagtcaagatcaaacctagcaaacacccatcaaggtcatttcttccccccttttctctctcgattaattgcatcattttcccgatgttttgatttgatctgcattgccgtctgcatattttgacttctctcgcccgtttcagggattttgccatcccagaagctttctcttatccgcttgcctttttggaaaattctcttagggaactagtactagtattgctgatctcaatagtgaggtaatgatcttgtctttgagctattgaattgcgtggggttgaattttagacctgctgtgtctatttctgtcttaaatacgagctccttgtgcgcttggatatttggtctcagtctatatttatctgcttcttacgctgttacgctttccaaaggcaccatggtgttccctcaaagactctatctacatgcgctccttgttgcctgttgttgcgtcttctgcttgccgatgctcaaagaacccacccttcagaagcactgctttacgatctgttaaaagaagtctacttgaccctaaagattatttgagaaactggaatagaggcgacccttgcagatcaaattggactggagttactgctttaatgagattg

SEQ ID NO: 29118 - DNA, 571 bp, Arabidopsis thaliana columbia
catcatcccaaccatcataatctgacagttcacgttcttgagtcatttcagactcccatttccctatatcttcatcttcattctcagagaaatccattcgagctttcttgaacttcatgacgcctctcgccacaggtgttaaacatctcaagggatttgctacaaataaatcactttcaatgcttctgttcctagacaaagcccagctctttccagaaacttggctctccccacaaactctccatgaccctatactgtttaaaggagaagaaactgtctcggacaaatcagtactcacatgacttggacttcttaacacaagaggatcttctgacaatgaattccaattctcagattcacaaatgtctgtcccattcttctttccatgccttgaaagagaacgctttgttagcatccgctggttgaatattctaccttgaccaggacctgaagtttctgacctctcaaagtctttaccttctttagaatatcctcttcgatactccggtatctgttacaaaaatgataaagaaacttgtgttactaatctaacaaccaaatcaagaacgga

SEQ ID NO: 29119 - DNA, 521 bp, Arabidopsis thaliana columbia
tgcgtagaaaaaaagaaaaaaaatccatataccaaaaaacacttttgaacaaatccaaaagtttacatgatgacttgtgttgagatgtgatatatataagcctaccaaccaaatgcaaagacaagaaagaatccaaagataaattcacgaccaaccaaaccaactaaccaataatcactgattttcaattccattatataaattccaaccccgaaagaaacatccattggacttttatttgtcaaaacacgttttcacacggacttaacagaaaacttataaactactaaaatttataaattcatctaaatccgattttaaagaaaaacacgtgaccctctcgcagacgcagaagtaaaacgccaaaacaaaacgccattttttgtcgattcttcgtcgtcctcctttgaaattcacaccaatttgtctctcttcctagagaaacaaaagattattcgaaactcgggaaagtatcatccggtcaccggaaaattgattatttctgatgccaataggtgacc

SEQ ID NO: 29120 - DNA, 321 bp, Arabidopsis thaliana columbia
atgagaaccaagatgcttacggcgatggactataccgtagccaagcccaaccccactggcaggaggacttattggagacatatatgtggagagagtgagtgagagagagctagagagagacttaaaaatgtggaagacgaagagagtttgtaggagaaggggacaagtttgacgtagtccgcgggaaacacaattaaatggtgctgcagaacatttttttttttttttttttttttcttgtgctgcagaacataaattatcccacatatgtatatattagatgggttaggaagatatgaaattggtccccctaaaatcttt

SEQ ID NO: 29121 - DNA, 691 bp, Arabidopsis thaliana columbia
gacgtgacaggtcagacgccaagtggtctggtctctgttctgcggatagtcttattagcacctaactttttctttcacaaagaaaagagtaccaaaaaacgagttttctttcaaactttagtgtgactaatcaacatttactttgctttgttcatacagtataaaacaattgccattaaccgcatttctattgtatgcagacaaaatatcaaattcagattgattttcttatatgcaacttgcatttgttttagctggcaaatgaatgactcataactttttctttacaatttttattattattattatgtgcacattacacttcagtacgtaacgaatcaactttcaagcagccaatgaattttcttactcgttttcccaaattccactatacaatattttaataaactggattagtgattattcggttttgttagatgtcaatttatttgtcatcaaatcatcgaacaattggcaatgagtctcctcgacgcaccacgtcatcaaacgtacacctttcttcggcaacggcacagatcctacgatgccagcagggacaatactcaacccttggattggtgccacgtgtaatggtggaccccatccataatccacctgattgaatcctaattttccccactccgataaaaacagcgtattatatcccaccgccggcgcaaacggatcgtct

SEQ ID NO: 29122 - DNA, 653 bp, Arabidopsis thaliana columbia
tggtcatcttggatttggtagagtctctttcactggaattcaatgattgatcaatttgtaggatttcttagttatattcgcataaatataaaatgtgaatgttttagtctatgtgttctattctatgataggtctcgctcgtgagcgtattcgcatatatacatctcgatcgatccactatgctagaaaccacatttgtgatatataactgcagaaatttgttcattccatcaaaatatcatgaattagctcgacagtggacctagaagtgttcacattgttagagacttatacctttaaataatttgattcataaaactagttttgaaaaaaaaaaaaaacagagaggaagtggttattggtagtttgatgattttttatcacattccaaagcttttgtcattcaatttttttagttacaattaattctatataatgccagtaaattatactcagtatgattggaagatgatttcttaacacttataagttcatatgatttttctcatattcactaaatacttaaaaccctatacaattagaatcttttatttaaatcaataaagtacaaagtatataacaaaatgaagctagcctaccaataacacccaaaatatagcaatgggcccgtttataaacagattgaatagttg

SEQ ID NO: 29123 - DNA, 1089 bp, Arabidopsis thaliana columbia
tatagttcctcatcagtcggtgtagggttgagagtccatgcacaaatgcactagctttctctggtactgttgaaagtattcacaaaccgctgtcacttcttccttccctgattcaagaccaggcagatcgggcagcggtactgtgccatcaccagaagcagattcaaactcctcgtcttgggttgatagctcggttatgatttctgaatgaatctcctgacacgcgaggacaaacatggctactgtatcaggctgttgcacctctctgagagctgcaagcgcctcttgcagggaaccagcagccacatataaaataagggccctgcattaataaaatgaaattcttttctcatcatcggaactgtttgaggaatttatgtcacatttaaattttctaagttaaactgtattgaatgtgagcatgatgataaagtaccgccagacgttgtgctccgcatggagaacatgatcagcccacctttgcaataccctgagtagatagagagataggagtagttacaacgactagtaaccaataataggaaataataattagatctagaagtaaaccgtagaagaaaagacctggcataatccgatccttctaaatgtgttgcggccaaggtagcagcatcggtccatcgtccagaatcttggagctgcatattaaaaagtataaaatattctgtgtctaaaacgttgcctattattaaaccaagctaagaatattctcgaataactaatgaaatgacaatttcagtggaagcatagttccgaagaatatgcaatatgtagtatgaccaaggaaacaaagaaagctaacctgtgaacaagcttcttggtgcctaccaacggcacataaaagatgagtaccagtgagtgaattgtcggtccttaccatgttggctgcaacaacctacgtgtggaacaaatgtgatggaatgatttttttacaaggacacgaaagattatccaatatagcaaagacagatacctttagtgcaaggtcgagaagagatttagacacagcagaagcgagtgcaacagctcggagagcatttggatagaagtatggagaatctggagctg

SEQ ID NO: 29124 - DNA, 571 bp, Arabidopsis thaliana columbia
attcttatagttattcttatataggaaccagaaaatgttcaacagcatttatttatcaagatccagtcgaagaaccagagatcattttactttcttgaacataaaatgtggtatgagattctcttcagacagcaactgaggaactggtgtcattgagaagaccataaaaggtgtaatattcagaagtttctttaaacccgggaatcaattccgacaagaccctcaaaattgcagccaaatgctgcatatcattcgacgcgaatgctgcttctaggaacatcgacgatcgcacactcgtcacctgcaaatttgcatacacggaattaatcaaaaccaaaaccagatatagtgtactttcatctgttaagatattataccttatgcttctgagcatatcgcagagcttcaagatagtatccatcttgcacaagggaggagatgtaatcatggtgcaaggagagctgtctcaacatatcaagcccaagttttcttacccggatattttgacgaccactatccagaagttggaacgcgacttcctttgatggttcgattatctgcacataaatgt

SEQ ID NO: 29125 - DNA, 579 bp, Arabidopsis thaliana columbia
gaaaattaagttttagttaatatttattcccatgaaaatgtccgctactactaaagaaagaatcgtaacagacggatcacaaacagtcacagatccgagccctgttttgagtttacgagaagaatattaaaattctcatctttaaccattttatccgatcatgaatgtgagagacgagggaaaaactacggcggagaaacacggcggaggagaggagaataaatcaccggagaacaaatggcgatttaattctcctctagctcaagtgagcttaatgggattcgtttgtttctgttgtccaggaatgttcaacgctctctccggcatgggaggcggtggtcaagtagatccaaccgctgctaacaacgctaacaccgccgtttacaccgctttcaccgttttcggccttttaggcggcgggttttaaacgtcctcggtccacggctcacgttagccgctggatgttcgacttacgtactctacgccggaatctttcctctcgtcaaccatctccaccaccatgccttcgcgatagtcgccggaagctttctcggttgcggccggtgcttctctgggccg

SEQ ID NO: 29126 - DNA, 689 bp, Arabidopsis thaliana columbia
caaaaaaactgttgccaagcataacaaaatcaaaacttgagaatggattgaagtgcaacttaggagtaataaacacgataataaccttcaagttcagataagcggcgttggatatgactcttattccgattatccagtaattgtatcaatcgagagcctgattcacaatctggtctctgcttcaaaagtgcatcctcgaattcacccatcaaatcagctccatagggagctttattcgcctgcaaaaacaacaaagagaccaaaccacagattaaagcaaaaacctttagactgtaattcgacaaaacaagccactgaagatatctaatttccatagaaactcgaaaaaggagaaaactttgaacataaactcgaaagcaaagctacaaaaacaaatcacaggaccacataaatcgattcaaaacctcccaaacaaagcacaaaacacaaaaaggggcaaacatcaaaatctagggtgaggctggagaagggctcgagagtgaattacaggcggcgaagtaggtagcggcggagagacatcggagtcagagagagaagaagaagaagcgccatggtagattgaagaaacggcggtgaagaggtgaggaggcaaaggaaggtcacgagaaatgtaattgagagcacagatcagagacttggtggtctcactggatttcttgagaagtgcg

SEQ ID NO: 29127 - DNA, 853 bp, Arabidopsis thaliana columbia
ctacctcagaagaagtttgaactgagttagccactgaatgattcttcctgagtgaatcaaggctcaaaggattgtcactggaggtggtggaattgagaacatcaaggacctgtttcaaacgctagtaagttacttgtaccaacaaaggatcggaagaacgtaagcagcaaaacaaagaacaccaaggacctcttttgtgaaaagagatggaattgattccagagcttcacgttctctccagttaagatcctgaataaacaaccattcaacaacacgtttcaaaatttctttcaaatctttcagtacaatgtgatgatcgtaagttgattaccttgttgatgaagttattcctgatgttgtatttctctgaaatgatttacagaaataagtacatcttccaagaactaaagaaaaagaatccattaatggttggtaaagaacgaaccaaacagtgaacgcttgtgaagtctgtagctgatcatgagggtggagtaaacgagaaataagagaaaccccaaaaccactgatgtcacacattgtcgatagaggtctctgcacctagatcttctttggattctcctcgccatcagaaacttcaaaccctaatcgaatctaagagacgatcgccaaattcagtagctctctctctctctctccaagacgctttttctttgctcttctctgatctgtatagctaaagtagctaacgaataacagactattatttcaaatcggttttatatatgcagcggaaaacattaacgtcgtcttttgggatccaattatttaaagaccctaacggcgtcgtttatcccgatggcttagagggtgatccaacgcatcgtttaaataa

SEQ ID NO: 29128 - DNA, 814 bp, Arabidopsis thaliana columbia
aggtacattaacaagctctgtattagtaatcaatcaaaaactgaataaaatagatcagatttgaatttccattgaaatggagaaggatgaagtgtaattttaaaggctgcatacctgtcccgtcttttctcgaggaatcgttgaagcgaatgctccttgcaataggtagatctgttacggcaaacataattgtaagaaactaatgagagtatccattttcaaggtttgaagattactataaccagttgaatcgaatacttaccagccgtggatctgcaaaacgagattggctgaataggaaatggctgtgcagctggtgatgccacattagatgtgcttgagaaagaaggagctctgttcagtgctggcgatgagacaggactgatgcttgtagaattctttgtctccattgctttagcagcaatacgaaggatttcttgaacctataggcatagatcacagtgagaacagaaattctgaagtttttctgacaacaacaaagctctaatggaccaaccttttctgatggaagtccatcaaacacagtaacacttccaccaaagaaaatagtaagttgatttggaggaaccgttggctcagcggtttgaatctccgtggaccttcaatagcagaagatctattaaacttgtgaccgacactataaagatggacttattgatgcaacattaagaaaactctccacatatgaatccagtctctccaatttcacatgttaacggtgaagttctattaatcaaattcacatgaaaacttatgtatgcattaaaggactttgaaaaacacaagtttgtta

SEQ ID NO: 29129 - DNA, 582 bp, Arabidopsis thaliana columbia
atcacgtttctcatgctctcattttcaaaacatcaaatcatatgatattccatgttacattataggtcatttatcactacactgcaataattgcaacttttcaatatccagcgcataccataccatttttttttttgtgcaaacattttaaagtgttaaaaggatatatatacttttgcaaaaaaacacaaatgattctaacaataataaaacaatatagcaatacatatctctaatcatgaaatcaaaaaccagaaatgatcatactataatatatactagtaactatatattgaaacttgggtgataaattttgagtaaagatgacaagtcacaaagatctcgctactaccaaaaaaaatgtgcattagcagtaagaatcagagacaaactatgtctgtgtatagccaaaaatatggtgtttttgtttttatttttatacaaaaaatgagagatttcagaccagctataggaattagacagcttcacttacaagtaaagctgaataagctcgtcacttactacagatggagtgagacaccaagatcagtgaagagtagagtcaagtactgaggaggagtg

SEQ ID NO: 29130 - DNA, 508 bp, Arabidopsis thaliana columbia
atccttcatacccctaatggaccgtaatcggctaatgatgaaggtttctctttaagattgtgaattgtgatgagtgggacttgatggccggcgtagaactgttcagaagagcgtgttttgcgactgatctgacctctcgccatgtcgtatgttccagcagttcatagatctgatgactcggattcctgtttcttttcactcagagaatttagcaaaggcagagaattggtgattggagttttaactgaattctggtaaaatccttggatggcaaacgatgatttgattagcagagttcggtggatttgatcggagtttcagcccggtggaaacgctaggaatgagtcggttgcgtcttcttccaccttcagcagatgttacacacgtgtcacatacacatgtcccttttacccatacgtgttcgtctattttgattgtaatagctatattgggttaattgggctttctgtacttgggatccttttcaccatgtatcccttttatgggt

SEQ ID NO: 29131 - DNA, 748 bp, Arabidopsis thaliana columbia
gtgttgactttttggttaagaaagaaactaaagaagctaaattctctgtacagtttaacactgctccaattcaattgtttgtgtgtgtcataaagctgccagccgttggatttaatgacaaagctgtgacgcagaacgaagcggcgcctatttcctctgcagattcaacggctacgatttaattctcctgctgaaaatataatgcacttttcttttgtatcgatattaaatagatgttacttgtaacagagggtgtctctgcatctctctttaaagtctgttgtcagtctatcttcgaactctgcccctcaggtgtaatccatatttcaaacctctgctctaatcctagccatccatttgtctcaagtcccatccaaaagcccatttaaagatcaaaagttcatcattcaaaatctggtctatttgggcctcgagtaaaaaaattaataggactagtctatgaaacccattaaagttcttggataccaaaatcaaggctcctttaataaactttaaaagttttgtgtcgacacatgtttcgaaagtttgtttgcttgcaattatataattagatcagttttgtatagagaacctaaaagttcaaatcttccttttgaagttttgtatagagaacataaatatttggtaaagtgacactgaataaatacaatatttctttattttgttgttcatgaatgcttgaacaagtaattttgggtccgtaatatatctaagcaacattttttta

SEQ ID NO: 29132 - DNA, 610 bp, Arabidopsis thaliana columbia
ctgtaccaatagatcctaatctcactccaccagttatcaaaagagcgccccctaaagtcaagcagccaccgccaactcctaaacgacgtgttggccgtgatgatgttgagatgaagaaaggagattggctatgcccaaagtaagtcacacctttgctcatctgatgacctcatggttttctttataagcctatatcacagtcttagcttaaccaactgtaaaattagatgcatagccttagctttgaatagaggcttagaattacaaagtcataaatttgtccctgttctgcttgtaatactaagaaagagtcttccgagtccaaggcgtcgatcatagaatatatcatggtttccacgtgacaatgcatattagttattgatgaagttaggtgagacataactcttcttctacatttgatccttaagccatccagaccgattagttattagctgtagatgtggtctaataaatttcacatagagcatcagttttggttgaagataaatcctataagcgttctccagttagattatcaaattttggactttgaggcctaacaaatcataaatcttgcaaagaacattaatttcagcagaagctaggcaca

SEQ ID NO: 29133 - DNA, 961 bp, Arabidopsis thaliana columbia
cacaactcgaaattgaaatttaactcacacattgtgtcctctggctaattgtcttccatgcaagtacacagcacatgacaacaataagtaataaaaagagttatgttggataatgaaaaaagaccaccgaatggtggatttcaatgctagcagatcaattattattttttacagaaatagtgaaaagtcattttacactaaaacattaactcgaaattaaaaatccaaccccacatttctccctctttctcacattcgccccaacatttttcttcctcctctatcaaactctcaacgaccgaccaagcgaggatcaacctcaaccctagcaacaccagccggagcctccttagccacctcaacctctcctttcacaagctcaaccgccacgtcatcaccactcttcttcacctgttcctcgtcgtaattaggatctccttcatccatcgccggtggatccggctgcatctcgtaatcctccatccgatcaggtccttcccacgtgtacttcccgccgtgacctgacttcgatggtggtcgcctgagaggaatcccatcggaaggatgacgatccatccgttgaacacctttctccataacgttccgctcaacgctcttgatcgtctccggattacgtgtcttcacttcgaacttatcaacagatttccggccttcttcattcttgtcgtccgcccgtagcaccaccgtgtttttggtttcatcaactgataccgcctgcatcttagatatacagaaataaatcaaagtcgtgatacttcactacttgtacgtttgcgtttaattagaatgagcaaagagtgttttctttatataagagtgtgtgtaagaggtgcgtgaggggataagaagataggggacaaaaatatctgatgaattgaagtttctagcgactaccttgtctttctcgtagcttacggaaacttctcatttttttatttga

SEQ ID NO: 29134 - DNA, 547 bp, Arabidopsis thaliana columbia
tgagactaatgtatgttaggctctacggttgagtaggagaatttaactcttgcaacctacacatccgcagtttaaactttagacatgtatgttcgattggttaaggttgtagataacggttttttggtgttgtagaattaggttatagtttaagattttgttatattttttgcaaaattttcgaaatgatttgtaaatatattagtttttttttatattgtaaataatattatatagttcttctacctcgtaaattattttttttatggtgtaatttttcgtaacttctaaataaataaattaatatattaagtatagcatgtaaaatctatattaatacgtaccatattatatagatgtctaaaagtaaataaattttatgcatagataataccataaatataattataaatgtatatgttatttctttgtgtgtgccatactgctatatataaatttttggatttgtctttttggcgggcaaccgaatggggcagcatgatgtgaacgggatttgttgtggagttaagtgaactttatgcacttg

SEQ ID NO: 29135 - DNA, 466 bp, Arabidopsis thaliana columbia
ttccatggtttaacaaagtattgatcatctctatattcgtcaatttgtactaatatcaaaattaaattgtttacaatttttagtaaatcattcactgatgactagaaattcacagtctcattattatttgtatttaggaccaaggagaaccaatatggaggttggaggattcttaggttgacggtgacaaatctgagggttagagcgcgttatttcgggttgctaggtcggggactcggggttcaggtagtggttgtcttgtttcggtttattctggaagggaagttacaggttcaggcttagcggcggcttcttctgaaaggcggatctgattactcctctttgagcttgtcgtcgtttggaagccgcaaagtagtctcccttgcaatcgccagagctagtagatgtgttttcttgttgcttccttccagaccgttcaaatctcagatttaggtttcgtcgccgg

SEQ ID NO: 29136 - DNA, 778 bp, Arabidopsis thaliana columbia
gatccctgttttgatctcaaatcttaggcatgattcatggtcagatgcttcattctttcccttcccccatcccagtgttgtttctgcattgctttctccagattgcgagggtgacagaaccgagagaatctgtgagcggaagttagacggtaacaacgatgtcaggattggtttggaaaagatgttgaatgaatggctcagatttggttgaagtgatgaatgtttattattgtattctttttgtcttttgttctgttttgtacttttctcatgtaagcacagacataaataaacataatcttgtatttagccgaataagtgtgattatgactcatggatgggcacatgttaaaatataaacgagacttaaatttccgccaatggctgagatgttcagtcgactccctccccctttgtgggggtccggacccctacgagtgagcagattacttagcacactaaaccacaagagagtataatatcataaatttttgacatttcttcaagcatgaatttaaattggttgtacgttacacaacttatgccgtatcaaaaaacttatgccgtatcttttctccaaaccatcatctctgtgttacgttaatatatgagatgacaatcacttgttatcaatatgcatgtgaaaatctaactaattgcgtagaaaacgtgggcctagaaacaataaaacccaagtttcatgatccatctaatccaactccattaggttcttcatgcaatgattctcttttgcactctcagtacaagttatatatga

SEQ ID NO: 29137 - DNA, 589 bp, Arabidopsis thaliana columbia
gagtgtaatgtatctacggatgatgtgtaaatattatggagagaaagagagtgttgagtctttgagaaatcaaaatcgataaagggtttatgattctaaaacaactcaaaaagtataatttttagtgtttgcttagaagctctatctccaatttttgagggtttgtttggctttgttgaatctttatgaaataaatttgaccaagagtagatgattatgagagtattttataatctatgtgcttcacttttgcatcgaagatctgttttcagactttaatctacaatttttagagtgtactcaatgaggtatcaaaatcaatgaaatgatggttactagagtaattgcaaaaattcatgtatgtttccaagctctgtttgtgacttgccttttcaggttttaaggtttatttttaggctattttccgttaatttttttggttggtttaggagatcaaaaacttcataaaactggacaaagtgttggtaacatacctaaaaactgtataaagagagcataatacgatattcagcccaaaacgccaaataacgcaaactcgataaggagaagagggtttacatgggtagtg

SEQ ID NO: 29138 - DNA, 663 bp, Arabidopsis thaliana columbia
  unsure (1)..(663): unsure at all n locations
cccccccaccccacacgacacacaccacactcccccctcaccccccccactcccctcacctaactgactgcacaccaccccccccttatcatctaactgacctcatagccaattcgtatgtcaggtagattctcagactgctaatgaaagcaggagacaaagattggtggttgtctgattgcgaaggcaaactattacaaagctgatggttggcatgtttgtatgatacacttgaacacagaacaaacgaatgtatattatgatgtttgtatgataagctagggtttctggatggttctagagtaggattttgatctagtgaaaattaggttaagttttgggtagattgtagatttgaatggtgttgtgttagagagtttgatgattagtacggaaaaattggatgttggagtttttgttcatgattttgttngaggttttgatattgtggatgttgtgttgttaatgtatgtcgtttatataaggcggcaagttcttacttgaatgcgatgtattgtctntatgttaatatttgagaaagtttatgcncatattttataaaattgctnatgtcttaatgaagatttggttttgaaaagaaattgtaaaagaaaacatatatagatagttatgacagaaatggagtaggagagttagatggtg

SEQ ID NO: 29139 - DNA, 835 bp, Arabidopsis thaliana columbia
taagttcaatgatctgatcctataactaacgaagtataaacctggagatcaaaatcatgttttgaagacaaggctttagcagactccggcagaacaatctgttcaagcgatctcccacagttacgtccaaggagcaaccggtttacctcctgcaaatccaatcatcaacaatccatattttttaaagctgatcaacataactaaaataaacacttgaaaccactagaacaaaagatccataatatcatcattcgaattagacaggctaatcaaaagcgagatcaaacacactagaagagtaatttagtttggagggagtggatacgtcacctgatagagctcgggcttaagattcgctgataagagttgatgcagcgaatcatagccgcaaatcgatccttcggcacttgtttctccgttttctgatatcatatgatccattttttcacgagtctttttcgatcacgaaaccaagatggcgatgacttttatgacaacagtgatcgatcggtttggtcaattgattacgaattattttctgggaatcggaatgtaatattttattttagttaggctgtccagacctaaagcccaccagattatattttaattcttaaaagaattattgggctttacaacatcctaaaaagcatctgtattggtggtttttcgttcaaatctctcatctacaaaaataaaaataaaatagtaaataatgttttttttaattaaaaaaatctctcagtaaagatgagtgagtctccatttgagagattcaagaaacttttccaattgtttagagaactgcctaagagaataatattcatcttatttt

SEQ ID NO: 29140 - DNA, 706 bp, Arabidopsis thaliana columbia
ctcacaatgtctgaaaacagcaaaatcatcgttctacttcctccagacccagatccaaaaccctaatcctcatcggctctctcttcaccgtctctctactcgtcatcctctacacctcttcttcctcctcccgagcctccatctccaatcccaacccgtcggaccgaccagagacgtccttcgttacctcgcttgagcatttcttaatatataaagctccgaagctctcgttaccggttagagacgacacggtgcgtggcgagagtgatgatgatgtgaggaagctcgatgagatggtgttcgagagagagaatcgttggttgaacgaagatccgggatatcctgttgaatttccgattaaggtttacgtgtatgagatgccgaagaagtttactttcgatcttctctggttatttcacaatacttacaaagagacttcgaatgctacctctaatggtagccctgtgcatcgtctaatcgaacaggtactataagaagcttaattgatcattttggttggttgttagatttcttgtgccattggtaattttggttggacgattgaattgaattgaagccaattcaaccgagaatcgtgattaggtttgtggttttgttcaattgtttgttcttcacttgtgtagcctgaataaacttgtctatttttttttctatattgcagcattctattgactattggctttgg

SEQ ID NO: 29141 - DNA, 881 bp, Arabidopsis thaliana
caataatcaacaaaagaaaataaccagtttagtatttgcatagtcaaatagatgaatttcttctaatgtagttaaggaattatattagtgttccttctaaacgataacaggacactagctagcgaggagagatatctaaaaatgcgcattaaccaaaaacaaaaaaaaaacgccccaacattattgggctgaaatagttggtcatagcgaactaatgggcttttgtaatgctgtccagaggcttgtgttacaaactttgtttttattgaaaatgatacatacgtcgaatcaagtttagtaaaaatgtatacccactggccactggttccatgggtttacagaacttatttttaatggccttgttgtagtgtgtgttgttaaagcaaaaccatgtgggattatgtttaagtgaaagagtaatgaaattgatttattatcattggatttacataaacagattaattccacctcctctacacaaccatatgaagcccttccaatggtaaagtacacgtgtcaacgttccattagcttcaaccaagatactaattactttccccattccgacacacgaaatcatgatgaaaaaaattaacgatcaaatagcgaaatacgaaaataaatcaaattctcacattaacaccaaagatttgaaataatttgagggataaaaaaaaaattatatatgaaaagttctcaagccaaaacggcggcgtacataatagcggcgaaggcggttccggcgaagaaagccttgttggagaatgcggcgcttggggcaggggatgcatctgaaggtccgcgagcactgctttgggctcagcggtgggacttccggtgctggtggagaggcggtgggaacatcagcaggagaaggagca

SEQ ID NO: 29142 - DNA, 820 bp, Arabidopsis thaliana columbia
ccccgtaaaagggtccataaatctaaccaaattgtcacctctagacccggcgataccattttaatagtagccggtgggaactatcgcgtttctaatattcagattaaaaagcctctttgcctggtatgtctttcaaagaatatatgtctagtgtaattgcttgatatttctgaaagaatcgtttataactttctctagaaatggcaatgtgaaattggtctactttcacatgtttcttgagtcttgccaaaaaaaattagacttcaaaaatcgcaagtagtgaaaaataatttataggacttagtataaaccatttataccaacatctgtgtagtatccaagaaacatgtgaacatatggtaacatatctattctcatgaggatggagattccattccatgccataggtctcggcatctgagatcagtatgcattgaagagatccagagaaaacaatgccacgtcttaggtaccaaaatagaaatgaaagatatcttaagcttgcacacaattactttcaatgccacaactggaaactaagcacgagctgtttgtgacatggacgttttaacgagtgttaaagaactagaacttgatgactaaaattttctttgactgtcgtgagactcgaaaaaaagaattgagttcgacttcaaagtcttttatgcacttgccactacctatcagtaatgtccttttctcatctgggcacacatggaatgactgtaagctgtaatgaaactattgaaagtagaccttggtgtatgaattaggatgaaagatagagttgagaatatgagtgattatcgatgatgtatgg

SEQ ID NO: 29143 - DNA, 986 bp, Arabidopsis thaliana columbia
tgtccaaaagtagtactgtccagaagcggggcccatgggatatgcctatcagagtgggcttcctgtgacctctcacaccaccacgtaggacctacgagccgagtgctcaacggtggagaaagagaagggtcgttgtcgttgagaagtctccgtctctccagtttcattgtatttgattcgcatttagtgggtgtgctttgtgcagcctcattttggaatagtgaaatttgactataaacatgcgcaaatgagccacaacatatttcaaactacttggtacgcggtcaatacaaattcaaccacaatttgctcatttccttggcatgtaatcgatgtggatatcactaaccagagttttctaaaagaaaaacatattgatccctaacatatgctccagtggaaaatgtaaaaacaaatactcgagtgtcataatatatctctttgttcaggtcatgcgaggcacaatcaaacaggtctcgaaggagcatacgactgaccaaagtaaaagtggagagatatacaataatgtttcataggaattggaagaaaactgcgattacaaatctgaagaataaaaagggaaatgctgacatcctaatttccttgtttgaagagaatggatgcaagaccagacctccatccgaaatacgctgttggcataggccttttgtgtaaaagtgatgccagtccggctgataccccctgaccaggcagcctcaccaactcctgactagcaatcggctcagcaaacctgttttacaatcccaaataactttttaagtaagttactctcaactctgcgaaggaaaacaagtgcacatgcttcatgcttctgtgtgatgttccactataatgtattttagtaactgttcaacagactctaaatagatcctcacttttcattcaatgattctataggacaaaatttgggtagtaagtgattcacagtagtcaatatacactgtatttaacccgtccaaaatccg

SEQ ID NO: 29144 - DNA, 564 bp, Arabidopsis thaliana columbia
gaggatacgaggatccccgaaccatcctttaattttgttttttttaaaaaaagggttttctttttagttttatcaatgtctcatatatattcattaatccataaatacaacattcgtataggagatttggtttgaagaggcgattctcatatatatacgtacacatcaaaattaaatcaacgaatgacttcaatgtcgtttatggaatggtttcattttgggccatgagaaattagtaaggcacgtggaaaatttgcgtactcaaaatagaaaacacgtacattttatcattttaattggttttattattgataaaaacagaatatatcattattgcgttgtttgtgtgtgtgactttacaattattttgtaaggcatagttttaattaaatgtcaataagctatttaaattatgatacaatgacgaaaacgcccatggagaagctgagattcaccgggattgcctatcctcgtcaccaaacactcccactttttcctcttcctcccagaaagaaagaacgaaagaaaaagaataatatcatcaacaacagaagaagaagatat

SEQ ID NO: 29145 - DNA, 589 bp, Arabidopsis thaliana columbia
gccagtgtgctctaaagacggagatggcggagtggataatgggactacagcaggtactgttaccgaaccattgagcgttgcgtcacgatcgggaatatgaagtgaatctctaaccatggcttctttcgaaacttcaggttgcgactgccacgatcgtgacgatatccgtggattccccgttgatccataatgcctctgctttcgctcaccaggccgcgactccgctagagacggaacatgccgcgtttgctgtcggattggcccaccgatcagagatggtcatgcagcttaggaacttggagacaggcgctgccagggatgtcagtggcgttctcagggtgagcaagggaggcgcgtggggacagagagagaacgccggcgaggagagttgggaggaaagagaggttctgtactttgtacaaagggatggaggggttagtgtttttggacgcggggaatagatgatcaatgctggtcgttgatgtccggaaggttgtaaaaagacacaagctgatcaagccctcaaagactgattgatgagcgtattaaggcaaaggatggattcagaggcagatcacgttggaaaggt

SEQ ID NO: 29146 - DNA, 1056 bp, Arabidopsis thaliana columbia
tttggttttactatctcatttactttctgggtaaaccttgtgtgacatatgacatttggaaataagatggaacagaagaaaaccttaacaagcgagcaatttttttccctgtccctctccagaacaaatactttactgaaagcaggtttccctgacaagagcaaaaaacatgcgaaaacaaacaaaaaacgttataacgacaacaaattatatttagtgtgaattaatctgttgctctagctaatggtataagataatataactaaccttccggagaagcaacatataatccttgtgcgaccccaggatatcgaaccactcctataggctgtttgattactaccttcagaatgtaaataaaaaaaggagcattgttcatagatgttatctcagttgcatattaaggtatactgtacttatagtatttgatattaattctcagcacaaataataaaaatggccttgcctcgtcttcttcaactataccatctgctagtgctcgatatatctttgatagttttcttcctgttccacactcttgatccaggttgctgtaagaatgaagagtttaaatccaaaatccaatatgtaatactaaggatcttttcaagaatgagctgggtcaaaaagtaaacaagagatcatgtttgaactcacccggagccgacaagagatgttccctcagcaaaatacgctgcaagtttcgtttttgccagcttggtctttgcacagagaagtatacctgaaataaatgttgaaaacaacatatcttaacagtagagagagatcattatagagatgcttttgcgatacgaactgataagtccagtgaagagtacaacatttataaagcagtggagaatactaacatcatagctggtttaatgaaaaggaaagcaaaacacgtctatagactaacctgaagttcctctacccagtcgatgtacagggacaggatgtggtgattccgcgatccgatgtaagagtcatttttaccaagacaccactgcagctgcgtcaacacagtccgttgctggaaaagtcctcgggcaatac

SEQ ID NO: 29147 - DNA, 650 bp, Arabidopsis thaliana columbia
  unsure (1)..(650): unsure at all n locations
tatatgtattatgaatgtatccaagttttgtccataagaattcctctaatattaatagctaaattaaggaaacacctataaaccagatatagatgattatacttgttataatcatttactatagataggtacaataggagtatatttgattaatcaatattccttcttgatatttcaataacgattacctaactccattggcactaatctttatttttgtcaccaaatctttaagttcatttacgcatgagatcatcttgtcccctttcagatctaatttgtcacaatcactttaaatttaattaagatgccattcgctttaaatttagacttggtcaatgattataattataatcgatcgactcatcaccttttgagtcgtgtgactcgtgcgtataaaaaccatttttgttgtcagatattttaacttgattttgccatctcttcactattgttacatcagtaaatcgcttcgtaagtggagattaatttgcaaattttggaactaattactgaccagtgatccactctatatatggttgtattagtacttgattggcaaataacaaaaaaaaaacttaaatanaaaaactgtgttattcttaaatttatagtatatggattagttttaagagtgtggctgggaaata

SEQ ID NO: 29148 - DNA, 728 bp, Arabidopsis thaliana columbia
aatcaatcaagattatattcccttaataatttgttatttaatctaataactaaaccaagtctaataatttaatattagttgcttaacacgtaattgactacgccacatccatttacgtgaccaaatactccccggtttaataattaaaccaacgccacaattcaaatcacgtacatgtcaatgctacttctggtttgacaattaacccaacgctttctaataagccaataactgactatatcgtcttcttcactaacacaacccaactgacgccataaccgatcaactcaaaaggttccttaataatcaagtttcaattcatggccgtaactatacgtaatcccttggtttaggttggttcaataattaaacaacacaacaccttaacatgaatacgagaataaggtttcaccgttatctcactctgcaacgaagaagtagaggattcggtatcacagacccaaacaaagcaccaatgatagatctagattccggtgaagaaggaggacgaagaaggctaatagtggctcagatggtgatgattagggttggatgttacgtgacgataacttcacgtcaccacttaacacgatcgggaccacaaccacaaactacaacgatggtgaactcgatagtggaggatgatggtgacttgagagttgagacaaatttctatgattttgataaggttaacattgcgtgctcgtacataagcggcgagaggaaga

SEQ ID NO: 29149 - DNA, 881 bp, Arabidopsis thaliana columbia
ccgaggagtttgaagagctgaagagcttgacgaagaggagcgagctgatgaactacttgagaagggcccaatccgacccctaacaaagacttatgtttagatatgttttcatgcgatccaaactatactatatatttttttggacggattttttaataagttttatggagttcacagacgagtttgaacgaagcgttttctttatatatgtgctatgcgaaataaaaacttgaagacaaatttaaataataatgtgatgtagtagggcaattgcataatcgataaatccggataagtgtgccccgatacaacaaaagcaacaacgtttacgaaaatttaacaagtccaaaagtaacagacatgataataatatcctcattacaaaactcaacacacgatcaaaataagtgaacataacataaaccataaaccctcaagtttcaatacgtatcaggagatttaatgggggggggggttaaaatcatatactcctccttgccgaactattaggggtcggattgggcctacttggcccaatgcccaaacccaagtcaaaagcccaaaataagttccaaaccaaggaggagtattaaggcgaagggtagtttcgtcaaatccctcgatgaatgccctacacgcgtagtgctataaatacggaatagcatgtcatgtcgaaggggggaattccgcctgacacgcagacacagagtagctcgcctttctcaagtagctcgtcagcgagcccttctcaagaagctcgttagctcgctcctcttcgacaagcttatcaactcgttctcttcaccaagtccctcagctcgtcttcaagctctccaactcgtctttaagctcttcaaactcttcagatcgccattaagctc

SEQ ID NO: 29150 - DNA, 480 bp, Arabidopsis thaliana columbia
tgagaaaataggcccagtacccaataaacaaggaacctccatatgcaacttgtgacaatgcgaagattatcactttttcctgaacatgttgaagataaccttaagttcgataatatatgctttattttgcctgaaacaagatggaatagtacaaggactgtaccatgttggtttgcatgactaggagagagtacagagttacacaccgtgccaatgtagctacggtctcaacaatgagtcgcaactgtagtttcagcaatgtctgagagaggatatacaaaggttcagccataagctccagtacacatgcaaatcctgccacgttagtaggttagtccttgagttgattacagacacaagtatgaccgaaaaccgaaactttcaaattccaaggctgtaagctaaagaactatgataaaggcacaaaaaagaccacaatataccgtgcgtccagatagcctgtgcatatgggtcggagta

SEQ ID NO: 29151 - DNA, 973 bp, Arabidopsis thaliana columbia
tgaccaatcgaccacgcaatcgacaactttggtagattcaaattcctccgtagctctggtcctgaccaatcgaccaggcaatcgaccacgcaatcgaccactttggtagattcatattcctccgtagctctggtcctgaccaatcgaccacggaatcgaccacttggtctattgtcctgctagcttctccactttggtcactttgcattcttttagctcctttgtttgctccatttgctccattttacttccaaaactttaaactccactcatgtacctaagaaaaccaaatgcaaatgcaaatccaatactatatgccaaaatatgaatgcaaagcaacaaaaactaagagaaaaaggggttttaaaacaaccaaaaacactagatatcaaatatatcatatcttgcctccgtgatttacttcttgtccttaattactgctattgtaatttataattattatcgttatttaataaaatttgtacttgtttctcaattcggtttttgagctcctatagtaagtcttcctatacacaataggctaaggaggtgcttggtcctgttatatatatggcctttatgaagaagaagaagaagaagaagaagaagaagaagggcagctcgaataaagagagagctcataagaagaagctgaaggcaggtcaaacacacataagagagaaagctcaagatgtgagttaagaagagatctcatgagagttgagagagacctcaggagtaataggcttatggggtagctaacttctatatgagaaaagtctatggagagttgttccataagacctaagtaagaggcttttgagagatgttccaaagatttaagttcttgagaaagatttagtttttagtaatttctaaatctatattaaagaaaagtcgttctttcatctttcaagttcttttgttgttgaactaccttgtaaatcattcagcgactaattctagatatgac

SEQ ID NO: 29152 - DNA, 610 bp, Arabidopsis thaliana columbia
tagtaacggtcgccagtgtgctctaaagctttagaggccatccattacgaagagttggcccttcgcgtggccgatgactatacattccgacggaccggtgccctcttctgtggctgccttgccggaggagtcgcgccaggtgagttcccacgcggtggccagagggagggcagagagggagagtagcgcgagtgtaggcttcatattgctcggtgtgcaatcaggactatgacgagggattatgacgggtaggtttgcgggtgggaaagcaagtcaagacagggagaaaaggtggtatttattgggtgcaatccccatgctcgactagcacgaagggctgctccttacgcggctggagattcagctcgatccttggcggacggaacgatgctagagctggttaggttttagaaaaaacgtgctcctattggagtggtcacaatgctaggatgcagaagcgagatgcgctgtcccggtggggatgctgggatggagcccacatcatgagacgcaattgagacgcaattatgcagcctgcacgcgacttggaggttgcattcgatgagcactacaaacatggtcagttagatgggttaggtacacaagaggg

SEQ ID NO: 29153 - DNA, 527 bp, Arabidopsis thaliana columbia
ggcctgccccaaatattactgccaaactacaacagggataaattagcaggataacctgatggtcaaggtctcagaaacgcgttcattgagagagaacccgagaaacataccttgttacactgagtgctgatagttgatcttgaacagcttcgttagcctgttggttagctgaatacaagaagttcccgaccgaatctccaaggcttccttcagccaagatgtaaatggaagtggcttgatcctgtcttaaggggaaattagtttctgattttacaagcaatcggacgtatctcaaggcagaaaagcataggcacaaattcgttccaaacaaaaatattgagatataatccctaaccaaggtctaaggagaaaaggaaaaaaaaacacttattgacataatctcaataaactattcaggttaagatgtggaacataattgaactagtctacagtaacagaaacaaaagaagaaagcacacaagtatataaacaataatatcaaaatctatgattaaccgttccaagac

SEQ ID NO: 29154 - DNA, 1039 bp, Arabidopsis thaliana columbia
taaccggaacatcattttaatgcatcgtcatgcattacctggcatacgctccgagtattgtaccatcatgtaagtgaccactcaagatcaaaacttattgacacaattacaacacaaaaaggaaggcaacagcttactctaagcatgattgtattaggtaaaccccctgaataccacttagacacaataacctcatgcagaactatatataagtagtttaccacaccctaaacaagtatagacaatcaagtaccaaatcacgtattaatatatgtacataatataacaaggatctaatcacaacctcatagcatatatcatataagtataacaatataacaaggcaagtaagccctcgaatcatatctcaattcatcaagtaaacttagttaaatctgaattcacttagcctagtcaccagtccattccattccttagtgatattactatcaagttcatcaaatgcccatattgactttgagattcaagttctaacttaatccaaattccgattagttaagtctaagtgagtaagcatgcatatgatctaaagactagctctagaaaacatgcaaacaaacacacaattcaaccacaactcacagattcggtatttgagaagatttctgagtcacgagcaagatcctttgtcatagtcagccggtcgaacactcacggacgagttatcttgctcacggtcgatgattttccctcttacggacgagatccctcgaccacggtcaagtttctctcgattcgggtaaagttttcttggtttaagactattttctatcagtcgacagcctttcggttctctctcgcctcaaaaatgaaaatgggcgaaaaatgaagactatttatagtccgcctaagttggcccatgcagcaccgactaccgccccatgtctggacactgccgcacacacgggcgacatatgtcacgggggacggcatggtgacaagtgacgacgggtgtcactccaccgccccatcagctttggctccaagactcaccgacctcggcttcaagactagtaac

SEQ ID NO: 29155 - DNA, 1386 bp, Arabidopsis thaliana columbia
ccgttaaggctaaaccttatccatattccggtcatccttattcttttagggtcgtgcttatccatttttggatgatgtttattcgaaaaagggaaggaaccaatcggaggccgattagtgtcccggagcggctgttggtcgacaattttaacgttttgattggtctgggccacctcgtgcttgccttggccgacctaatcaccaaccttggaccatatagtctaaaggaatgttatgtctcttatagactttgtgtctaagagtatggaggcatgtccttgggagatcatggattcgtagaaggccttacctaggttgatagaagcatgcttgcattagttgtccgctgcatattaggaaattcgagtctgcatgcattctgcatggtgcattatattttgcttgtgttgtatgttgcgtgttatctttgtttatgtcttgcttgttaggtagtattattgttacgtgttgttgctgcttagggggtaaggaagggtattacgataacactatatagatccggggttcactaagtaatgctagattacttatgacgctacttatctttttcaggaaaacttagttgaccaaccttgtagagggtgctcgtgacttaggacgaaccaatgtaggtctaacggctttttgtaaattcttactaagtgtattatgtatggttttcaaagaggatctgaaaactatatacgttttgctaaccatttctcgtatgatatatatatatctcccgataggttttgttatatatatatatataagactcggatttctaacactcatatggttatagtgactgatatttgtcttttccggactatcaccactcgcgtccgtggtacgggttgaaaagccttaggccacgggcgggaggctggactcatgcggttggacgactcgggcgaacgaattcgtttcgaaaacctgggttggctgactgcgggcgttcaacgtgacactcctattttatttatatttttatagcgggatagaggtgttacaaggtggtatcagagcatggtttgtgacgctacgagaaaccatggttttcaatgttttatcgagtaaatgtgtcgtaaaaagctattaggaaatttgttcagtcacttgctagagtttaggtagattgacctatagaacaaaccctttttgtttaggttggcttacccttgttgttagtattataggtggcttacccttttgcttgtattttcgtgtcttaacctctttgtttgtattatagtacccgctaaagagatcacgtggtgggagtctgtggaggaggagggacggtccttgggtctgtcgccaggcgatatgaccttcgtgagagagtcatgggtaggtgtgtgagaagggatgtggccgagt

SEQ ID NO: 29156 - DNA, 1036 bp, Arabidopsis thaliana columbia
attccagttcctacctataagcaacatccgctgatccctgatcgttagggttaatttaaattaactactgataaaataatttatttaatttttttggtagaaggccttctataaaaataattacgtgaaatattaatgggtatatgcagtagatgaccatgaaatccataatattatacaaactaaccatggacgtatagtacctgtcggaaaccaactttaaattactctcatatccttataataggattttggttgaggggacaaatagttttataggcaaatagctttactactaaagcttccataacctcctcttcccttacaacaataaccaccactagatctgtaacaccaccgcctcctccgtatttagtattactagatctgtaaacactaccgcctccgtattcaccaccatcatatccataacaccaccgcctcttccgtattcatcaccatcgccgtttacttttgttgacatgtatttttattttaaaacattgtatttttcaaaatttcttttaaataatatttgttctttactaaaattacaatgatctgtgtgtctcaattcaaacgatagcatgtaatttttgaataattcatgctatttttctatttgatatgtatattttcctaaaacgtttgtattttttgataagataatattttttaaagataatgtgcattttactaataatccatgttttctactaaaatcacaagtaagttactgattcatgattcatgtttttttttataatcacatgcaaatttgtacaatcacatgtaatctataaataacacatatgtggtttgcttatctctgttgaaaccatttaccatattgtcaaaacaataaacctacattctaatgtaataaaaataaatagcatgtccttaaatatcttatgcaacacttctatactcaatcacaactgtttctaaatggctatcttttaactaagtttttttttacatatacatttttaaagtataagagatattgcgtgtgattttaataagtagtggg

SEQ ID NO: 29157 - DNA, 1061 bp, Arabidopsis thaliana columbia
tgtgatttcgcataatgacatgcatccgtttatactatttgagaacccgaaacactttgagccaccatatattatccctttttgaccaagcccataacgtgttcgataccccgtttgtgagagtacacgcctctgttaatgaatgttaaaaggttaagttttttaattctgaaagttcttttagatctcggggtttaattttgtcgctacggttatggcgaagtacagtctagtacgggttgatgaattttgtgataatgatttgcaggcaattgataagagcatgataccgaagaaaatgtgagttctcgtgttttcaaacctcttctcttgataaagatttttgtttttccttgaggacaagcaaagatccaagtcggggggagttgatatgttgcgtttttggtgtcttaggtctcttagttttgagtagtttgtcgtgttgtagtctgtcttttgcgtcttttcggttgtgtcttgagtcatttgcaggttttaggtgtttaagcggaacacaaatgttttcgggacttatcgggctcatttggacaagaaacgatagcaggaatcgagaaaccggggtcagaaacattggatcgatcgatcccaccactagatcgatcgatccaaaactcatcgtcgaagacaaatcatccgccagctcgggatcaatcgatcctaggtggagatcgatctatccaccactcatccaccgaagtaaaatgtccgccagctcgggatcgatcgatccaacactctcgataaccagaccgaatttccttaaccgggtttatatgtctttttctgtatttgggtataaaaaaccccaggaacttaatttatctttttacgcttctttttcagtaacatttctaaaaacttttctgtaagcacttttggggattagagattcatccttcttgacaatttggagaagatttctaaactctgttcttaattattctatttgaatcatgttttctttcatatctctttgcttgatttctattgcaatgtctgagtaacaattgggttttagggttctaagtaggaagtcaatg

SEQ ID NO: 29158 - DNA, 557 bp, Arabidopsis thaliana columbia
tctctagtagctgccgcgataattctgttctcagatcaatcatacaaacatacacattgtatttgtatttaattgctaacgtaaaaacaaatagttttttttatatccgaaaattacgaaatagaattccaaattcatttccggtattcacagaattatgttttaatatattttaaaacgtatagccaaaataaattaatagtagaactccacaaatcgaatttgaattctgatcctaacgttacatagatatcgaaactactcgaaatctccgtcattttgatcaccatcaccatctcttggttaaaacaaacaatattgtttgttctttttgaaaaaacaaacaatatttattctgttgttacgtcggctcgagtggagatctagagtggttacaatgttttattcaaatggacggcttagatgtgacgagaggttttgcgggctccaactagattaggtgagagacggtggatctgatgctttacgattatcatacactcgtagagacacatggcaatctcttccttttgttggggtcaaatttactattttag

SEQ ID NO: 29159 - DNA, 941 bp, Arabidopsis thaliana columbia
tgatgcatttaggaatatcgttatcaatttataatggtaaacccataccagaagctcattggatattattatcagatgtttaccctaagggaactcgactttgtagccagagatgtgtgcaacctaagccgctctttggaacaacatctgaaggattggaagattcaccatttgtgttgttctctgtccttgtctccagtggaattgggggtaacgattgctgtttacgcactgtagtgttgcgtttctcgttttgtactctctcggtgaaatcagagaatcctaggaatgggcttataggggtcgtaggcgtagagtttagggacactacagttggaggtgatgtgaaggatgcaggagcgagaacggtcaaagatagatcttctgaagtcaaattcgatgcctgaagagttaaaatctgaaaccagtagagaaaaagtatgaggtagaataaaagatgccattgggattggtatttgcagatttagaaattggctaattttgaagaatatgaccacattgcaaataggtggctttgtaactgttgcatggtttcttattcatatatacgaagccagagttgcatagtttttagcaacttttgcaaccacaatttagcaacaacatctaattaaaccttcagtcatttgggtaaacactagcagtcactgtcacttgcagatgcgaactccttccattagttcatgcattgtcccatttattatctagggaatgtcagagagagataaagagagagaatgacctgaacgggtagttgagaggctccccatggggaccacaaggctctcctgacatttcagacgcaacagagatcatcaggtctctcgaaactcgtggtctccattttgtccgttgtttgaaaacagtcttgattctgagccaacataaaacagcattgatgaacagctatagatatgaat

SEQ ID NO: 29160 - DNA, 1170 bp, Arabidopsis thaliana columbia
tagatttcatgtgtatgattgagtataaaaactagaactgtaacccgatcttaaaatcctaagtagtgtttccttgttagaagatacaaagccaaagactcatacggacttcagctacaccaacaatgctttgagaagaaagaagaagcttggttagttttttggaatcaaatatgacttgatttcatgtttttgattgggtataagaagtagaaccgcaaccggatcttaaaagcctaagtagtatttcttttttagaagatactctagtttagagatgtgtttctagtttagagatgtgtttaagaactcaaagtaaagaataactctctttaatctctttaggaaaattactcaaaacctaaagctattgatctcttcacaatctctaaaaacccataaggttaaccacaactttggtaactcttatatagagatcaatagataattctagaataaacatttagattaatattagataactcctaataatatctttaggtaatgatatgtctataatttgcatgttttacacatctttttatcaccattttgagtctagtttcatccatctttcatagcatttgataataggtttttaattaattaaacctaaagcactatcatgtcgttgtaatactgaaggttgtcaatccaaatgggtgtgatgctaacaatcaagatgtgatcagaagtcactaagtcaagccaagcaataacaggttgtggtgtgttctagcagttctaagtgaacatggagaaaatagaaattcaagcagaaacagtaaaacactcgaccaacacagctctttgcagagcactgggtgaggtcgagtgacaggtcgagtaacagacagaaaataaaatacagatactcgactgcacagtctgttaccagacaattgggtggtcgagtaacaagaaagaactgcagaaattacgcgacagataacaagatgcagtaaataacagtggagtaaacacagaattcaatcagataaagaattcctgaggatggggtaattgagtagtttcgtttcctcagtttacaggtgattgacatgctcaataaattaaccctagacaacaagttcattaccaaatctaagtgccacgcaacagagactctcaagttaacctagtccagactcaatcaccattgacgagaga

SEQ ID NO: 29161 - DNA, 721 bp, Arabidopsis thaliana columbia
tagattataatattaaaagacgacaacatgatggatcggtttcgattaatgtcattataatctaggtgtattgataaccatccttccttacctcaattattgtttagttagtttaattgtcatgcacatgtattatatacagatatacgatggttattattattttttataactgcttgtgtatatacatgcatgtgtgaatggtcgtgtctgtatgttgctgcttgttgtgttgataaccaatcacaactataaaaggagatgaatagaaacaaaaatttaagtgttcataacgacaaatgataataggcttttagtcaattatcctaaaacaccaatcatgtcgttgtagtattttaggttgtcaatccaaatgggtgtgatgctaacaatcaagatgtgatcagaagtaactaagtcaagccaagcaataataggttttggtgcgttctagcagtcctaagtgaacatgcagaaaacagaaaatcaagcagaaacaaataaacactcgaccaacacagctcgttgcagagcactaggtgtgatcgagtgacaggtcgagtaacagacagataatgtaacaggaatactcgactgcacagtctgttgccagacaactgggtggtcgagtatcaggtcgagtaacagtaaagaattgcataaactgagcaacaaatgacaggatgtagtacacagcagtagagtaaacaacatgggggat

SEQ ID NO: 29162 - DNA, 968 bp, Arabidopsis thaliana columbia
atctcaagtgcacccgcacacacgacacctcaactccctgtcatccctggttatcccatcgatctcaaaaaatgtttgtcatcacttgtcaatgtttaaggttgcgtaactgaaatctataaatcagtttttacaagaaagtttgataatgttggaccaattaatgcgttgcacgacgttgtcggcaatagatgcaaagtgttgcccacaaatatttccactaaatccgttcttccctcctcttctcaaaagtgaatattctcgcatcaagagagccgatcctacacacaagtgaagtatctatgggaccattcacaatgttttaatttaggctcattatagattctagttccaaaattcaagaattatctctaaatcagtcatgaaagacattcacatggatgttggtttgttctaggttttcaatatctacaatgatcgatatacaaatttaagtttatggcaaaaaaaaaaaagaaggaaagggacctgtcagaccgccgtgcgaccaccccggcaaggtagaaccgagccgagtaacgatcctctacagcaccggatgcgtccgaagacgatcgtggccgtcaatcacgctctagccgcacggtcatggttcatcaaccagggtaaaaggcctgtctcttgagaaatcaaggaaacagaggtacgagcctatagaacagatcctgttcaagtaaggtcgtgaccatcaacgctctcacagtcttatatattcaagaagttaagtttctaggcaagcgatgtgggacttttacggagcacatgacataactcgatttggcgatatacgggccaacgcccacttaacttatatttacgaaaagcccaaacttatattatttgctccaaataaaatccaggcagggtagagtttgctttgaatagtccctactcggatcctttttagtgctccagttttgcaatattctcgtttttctgaccgacat

SEQ ID NO: 29163 - DNA, 550 bp, Arabidopsis thaliana columbia
tgtgtgacacaatgtagcataagccatcctacacttgctgcagatatgcaaagtttgtgtggtttgtgttcttcgattggttccttggttggtttctcccttagcggcgttttggtgcacttggttgggtccaaagtaggctctttaaagatctctttgaatgcatagagtcgaaatgcttcaagtgttttccactcattttgtcttctttttttggtggcagggtgtgtacggtttactcggtgtgacggcaggattgcttgttgtggttgggatggttctgaaagaatctccttctcgcagtctaggtcgcaagcatgtaagtgttttgctaccctttggtccaaccagattctttaagctagtaatgtaatcgagtaactgtgctttcaggttaacgacaagtttctggatgctggaagtgcaatatggaaaacctttcaatatggtgaggtgtggcgaccatgcttgttcatgctattgtcagctgcagtgagcttgcacattcacgaaggcatgttctattggtacacggattcaaaggatggcc

SEQ ID NO: 29164 - DNA, 838 bp, Arabidopsis thaliana columbia
tgcggaaaagttgtcgacggtgacacatagactttttctcctatctctcctctttgttttttttcacttgattcattctttttcatctgcaacaaatgctagattatataactttaccaaagatctattcttcctattaaacccttttttttgttacccattaaaaatcctaaatccatttgttgattgtaccactgtcattgatttgccatcactttacttctgataatttcgatcaattcaccaacaattcggatcgacttgatctttcgctcgtccaatcggtattatcgttgtcgtccacggcttcgctggcgaaaataattggttacccaactcacttattatctcttcgctaaatccgtttgcatcaccaaagccataaaatttccaacggacaatcgctcatatccttgacatcaatgtttagtctattacagattccaacttatttgatttgcccagaaaatgtttctgtaattccattaagttatcctacaaccaaacaaaccaattcattcgatttcgatttgtttgtctatttaaactattgattaacaaatgggtaaaaaaaatttgtgagaatcttaccatcgttaacgtcaccgctacggtttaccttagttatttgggttgccaattcaccctttctttaaattgtctatgatgaaaaaaaaaacaaaaaaaagttgtctataatgcaggattagtttaagggagcccttagtttaaccggtttgaggttctatttaaaaaacaataaatttgtaagatattttagttataataaaaaaaaaatatttcagtgaaaaaaaaaatctctcagtgccaaaatgta

SEQ ID NO: 29165 - DNA, 962 bp, Arabidopsis thaliana columbia
cggattatgttgcaaaatagcatagcagcttcataaaaacaattaatggtttttacattcaattttaggttcgatgtggagaaagtcacaactcacaacattcataaccactaacaataatctatttatttttttccaccaaatattatactcaagacattgatgcatggtatttctccgccgtaaacttctccgtcaagaagactcagctttcctgatatgtgacatatactttagggtttcaaattatagccaccagcactacaaaaaaacaaaagatttgcgagggaacttagcgagggataacgtgcctcgcaaatttactatggttttgcgagatacatgcgagggcggactcacatatcgcaaaaccctcgcaaaattggcgagtaatatattcctcataatttgtgaggaacttacgagtaccataatcggtcgcactttttgcgacggatttgcgagccagtctctagttcggtgaacacgttttaagaaaattggtgtgtctatagatagaaaacgtaagaaatgcaaaaatcataaatcaaaatcaaatacattatataaaaaaacttcttaaagaagtaactagaaagattgtttgagttcacctgatctatcttctagaaggatcatcggatcatcatgaaaacccaactacattgctagaattcatgttatatattggaaagaggtttacctccttgcttctatggtacaatcctcttcccgcgggtggaagctgtgggttcgagccctgtcagtcccggcggattcaatacatcaactccccttatcgttcatatactctattgtgtctgaaacttatggattacattggtgcaaatccaatcaactccaaagtatttttgtcccaacaattaagaattgttttcccctacttgaaaaagcttgtacagtttaggaaggggttttgattgatcaaacagaagaatcta

SEQ ID NO: 29166 - DNA, 789 bp, Arabidopsis thaliana columbia
tttcactttgcaataaagcttcatagcttgcattgaagtggcatgatgatctggattctccaattgctccaaagcctcaaaatcaacttgccctttctcttctctacaatgtcgaaaaacgcaattcaaaaaagaagcatcatcagaaattcccccaaattgaaacaaaaaatagggttttcaaaattacttagcagttcatacaatcaaaaatagaaaatcccaaagattcaatatttaacataatttctgacagaattcgatgacctagctcgaaactagacgaagagtttcaaaatcgagggtaaaattgagtgaagagctaagagaggaactagggttttgaggagtacatactcgtcgagggcgtcgagatagataagaattctggtgtaaagctcggagacaaagtcggaagttggggttttgagatcggtctctgtaacgctagcgatttgagcatccttgagcgccgtgataatgtcggaacgagagagcctcgggtactcgtaggctgacatagttttcagttttggtcaggttcggatttgttgtgtctggattcgaagaaactgaaaatgacaatttggaaagaaatgaaaaaaaaaaaagagagcctttgattttagttgggtcaggttcgatttgttttttgcatttgcttttcccgcctatatgaaactgcagtctctgcagatattgatgcatatttggatacggtagaacgtagaagcttttataaataaaattaaaaaagaaactttaatctacaaaaaaaaaaattaagca

SEQ ID NO: 29167 - DNA, 880 bp, Arabidopsis thaliana columbia
cttctagaggatgccacttttatcttcataaaactagaaaagaaaaattaaaattcgttttctgttttgatactttagattttcgaattttatttttgcattgattttagaaaataaaaagtttccatattttgtcctctttaccttattttgttgatttacgtttgatacatctttgtcttgtttgttgaaggaattccacaaaaaaagagagcaacaatgacatcatacgatatggagaaggaagaaaccaaccaagagatgtgtttcaatgagaggtatgaaaaactatggcatgaagagtactctgaatcagattttgaggatgaacttggctgtgaaatacaagaacctgaaccgcctgactcatacataaccaataaaggctattgtaaaccatggattaaatttaatgatgattttgcagccatgattcgtaatctccattgactcgagatatttctttttcaggaaaagaaaattatgttaagcaaagagaagtcatggactataaaggggcaacaacgaaggaataccattgccaaagtcctcaaaggcgtgaagataagattgaccgtcacactttcttttattgactgcctacagcatcacgtcaagtaaaaccgagacacaagttctttcacacaaatccacgagtagtacataaaataactcaagaagtgactcagagaacatcaatgtgacgtaaactgtaacaccccggtttcaggaatatggtggtgcatgcggagaagtttgaagaattgatttggccacctatgtgaccaaattgcacttatcttttctatcaaacatcttgagagaactccacagttaagcgtacttgggatagagtagtttcaggatgggtgacccttcc

SEQ ID NO: 29168 - DNA, 922 bp, Arabidopsis thaliana
aaagaatagtaggtctgtgggtcaaggaatctctctctcccctgctgtaccaccctaccccaccacatatcacatatacacagagcaagtcacacacacacacacatacacgggagggatgggagagaaagagagagagagagagagagagagagagagagagagagagagagagagaggagagagagagagagagagaatatccagcaattgcaatgtatgaccaggacacagggtcctaggaccatgactaatctggcgtccttcgaatccttcgaggatgctttctcgattcaccgtgatctcacttgtttcaatgcgcttccaagctatggtttcaaagctctcatggatttaaaatcgatgtatcgtatctttcattttatgacattggggaatgttagtgtcttaaactttggttttcttgaacctctctttttgtatttgcttttgtgatggaatgaatacaaattgtttgacaaaaaaaaaatgagttttaagagttagggtgatttgcaacaataacaaaaaaaaacataaaattaaatatatagcaccttttatgtattaattaggtaagtaacactttgacacatgagcaaagtctaaacgatccttgctttaccgtttccaactgaaaagagagaggcaagtggacatcagacgaaaagagatatggtcgagatcatcggagaagatggaaggaagagatggtgagagagaagaaaatagaaatctaaccgagaagaaaagatagccaaatccaaagagaaggtaaacaagaaagagaaacggtgacaaatttttggtggctggcttggatatgcaacatacacaagagatggtcaaacaaaggacataattttccggcaacgatttttcagcgacgattttcgggcgattattttccgacagtagtagc

SEQ ID NO: 29169 - DNA, 855 bp, Arabidopsis thaliana columbia
ccaagtttggcctcacggtctaaaagttctagagtcatacatttttaacaaaaagagaaaaaaaaaacggaaaaaaagagggatgcaccaagaggactttcctggaggtcacccatcctagtactactctcgcccaagcaggcttcattgcggagttctgatgggatccagtgcattagtgctggtatgatcgcatccgttactacatgcaatgcaatcgtatatatttttttttgaagactatatgatccatttgccgtgggtcccaccatctatgtagaaataccctatcttgtttataagagctttgatacatgcaaaatattcgaaaacaatgtccgaacatataatttttgccccgtaatatagcaaagatcacgaaaaggcccaaaaaactacattaaggtcaaaattttgagtaggaaaaaaaacgaatagaagaattccaatttccttcctcattcattggagagctccctttgggcttttcgaaaaggtatcacatgccaagtttggcctcacggtctaaaagttctagattcatacatttttaacaaaaaaaaaggagaaaaaacgaaaaaaaaagagggatgcaacacgaggactttcctggaggtcacccatcctagtactactctcggccaagcacgcttaactgtggagttctgatgggatccggtgcattagtgttggtatgatcgcatctgttactacatgcaatgcaatcgtatctattcttttttgaagactttatgatccatttgccgtgggtcccaccatctatgtaggaataccctatcttgtttataagagctttgatacatgcaaaatattcaaaaactatgtccaaacata

SEQ ID NO: 29170 - DNA, 514 bp, Arabidopsis thaliana columbia
ttcaagcagcggtaatgttgtggttagacgcgaatgcgataagcctgaatcttttgttgaagataatctcattcgtctcatcgtagatcgacattcaacatacatcaaagaatctcacaactgattgctcaagtgtgcttctaaaggcaaagaaaagttttaaatctttcctccacataaaatagaatcatagagcatcttgttatgtgtatgagtgatgattaaatttaaccataattaaaacaatatttcagatttgttgttagatcttttagaatttaacacattttgaaatgtttgaatttataaataggtaaatcacccaaaacttcacgaattaaaatatttagcgttcaatcttttagttaatggattggaacgaaataatttgaaagtattatcataattagcaccctgttcaagtcaaacacgtattctctagattaaaatatagttttagtcatgaaaatgtttagcatttttatctttataggtttaatcatctgtattgact

SEQ ID NO: 29171 - DNA, 602 bp, Arabidopsis thaliana columbia
atcttgttcgccagtactccaacaacacaagtatattttacggcattagtcgttaattaaatgactaatcaaactctaatcaaaatgtcagctaatttggaaattttctcatctcattgtgagccacctaattgcgtataagcaaacccatgaaagcaacttaccaattaaacatctaattagttatcttaatcacatcttaatcatgcttcccattggacaagcatagctcttatatctttttgaccattattttattcatgttaggtggagactacttttatattttagattagtattttcaagatgtcttatttgaatattcataatacgtctacaattaggatctctcttataacataaattatgttagatatttgaaaagttatacctggctgatatttaatttcaactgtatcattcaaatccaattaaatttctcttgtcattagataattctgatataacatccatccacacttgagtgttttctcaagtggattcttaaatattatatatagttggaagaatcttttggaatcttatgtcacttgatttaaccttaggagatgtcatatgaaattaagtcgtgcaagttatag

SEQ ID NO: 29172 - DNA, 654 bp, Arabidopsis thaliana columbia
cgcagagacaacgcagagaagtcttcttctctgaaatattacggcagcttctttacaagcattgaccaaccaaactcaagcttccgaactctttctttttcctcttgtttttttttttcttcgtcaaacattattaattcgtttcttctaattacgaattaccacataattttgttttcatccatttcctaagtaaattttaaatctttcgctttcacgacattttttttgtttttttttttctataaagtaatgacatttcaataaacaaatagagaattttgaatgaatgtagtggaaaagtggattaaactgctaaccgactacactaaactatttttggagcggataataaaccgtcacgtaccaaatttttttacgttaaaaagtttataattaatccaccgcggaattgttctattttttttttcagtccgtactactgattatagtttatgaatggttaacgaaaagcggtccgtcctaatcgccgcaaccatttgaatcctttgttagtactaaaagtttgtgattatgactaaaaaaaggtctagtttgaaaaatggttaatacttttaggcttatctaggtgaattagtgaattttaaaaaccttaagctcgactcataataataacaaaatagtggggctgaa

SEQ ID NO: 29173 - DNA, 617 bp, Arabidopsis thaliana columbia
cccctatatttgatttgtcctttttgtagattaattttgttttaatataagtataattgatagaagggcttccaggatttggtattttgtatttctcaaatttttgtaatatttattttattatttgattactcttaaatataaatgtaccgtataatcaattttttttttgtattttattttatataaatattttttaatatgtgtataagttcttatttgtttttcaattgtaatatatgtagatattttcaacgaatattatacatcaagagctttagtttattttcgttaaagttttcattctttattttaatattagatcacaataattatgctataaggtgattctatgacatttgtagagtagtttaaatatttttggtatattgttccaacaaaggtatatgggaaagttgaaattctattatctctgatttagtaataatagtgtttggcctatttggcatcacaaaagagttggcagttgggattgttttacttgtatttaaaatttcgaaagtctggggttcatttgcaataaaaagaaaatgatgagggcctaaataaacattaaacataaacaatcgccggaaagtttcttctcacgactaata

SEQ ID NO: 29174 - DNA, 1086 bp, Arabidopsis thaliana columbia
gaaaactagttttttgatatggtaactatgttttcaacacaacaaaattttatcgtcgaatgtccgaaatgataaagacactcttaaccttcatcggaaaaaatagcaattttttgtggtatatcaatagcggttacaatctaacttgttttgttgttgttattatgattagaactgtcaattgggtggaccgcatgtgggtttttacagtccaaatacacacggacggattatggtctggactccaaactaaaaaacataaaccaagcaatcaaaaagttagaataagatattttttagttaaaacaaaaatcgtaagtgaagaaggtctgaatttcttgaggaagataaacgggcacaaaaccggtgtacatacatggattatggatatgttctagaggaaaggtataattgaatactagtatccgttacagaaactaattgcattaagtttcgtctactgtttaagaccgcacgagatatatatgttagaccgactttgggaaagaggctacttaaattatttacgattaataatgccaacgtaacgcggacagacattttaattcaattattatttgttgcctgcgagattcgaaccatctcttatttcattacttaacccaaaccaaaaaaataaaaagttcatttcgaaagaagaagaagaaaacatcaaatcatgagtgggcaagagaatcatgatcatggccggatctcttctacgcccgccgccgcgtcggagccttccaaggctgctgctcactcctctgactacgctccttaccctaagctcgatcctaccgacgtcactcctcctcctcctcagcctattcccaccggtgccgccgcaaccaccatgccagcggaatccaatccttacgtttctccttcccctgccccaaggagtgagttcttcttctctctatccgatttcgcatcctaatccaatttctgcctttgattgattgattgatcttggtttggggacagatacgatggattcggtgaaggatacgttagggaaatgggggaaaatggctgccgacgccaccaagaaggcggaggatctcgccggaaatttttggc

SEQ ID NO: 29175 - DNA, 849 bp, Arabidopsis thaliana columbia
cgatattaattgcttggtttagttaagtttgtattagaaaaccagaatcaaactcttgttaaccttagattatgtacttgtgtattctcgatgagttaattcattactccttgtggttattagtgcattaggaatttaattgactaaaaaaccatatcaaagaacaaactcacttcttttttttttgtaaactgaacaaactcactttaacgtgtcatcttccttcgtaagaggcggtcagagaagcaaaactgtaccaaattaaatgtcataaggagtctgattcgattattcccttaatgaaagagtcacctacttgatgctctactgttatctacgagcatccaacattccctagatgtacaacttcaattgtttggactttggaggatctcgaaaataggatccgagtaaccgaatattcaaatgggaaaaagatagccaatcgtatacgatgtatatcacataaattctgattttttttattaaagttcaattttctatgggtttggccattttttgtatgatatgcaaccatgttcaacaaattatggcctctgttctcttgtttgtagagttttcctcgttaagctgttttagacttctagttccatctcaggatctagcttttcaatattttaaattttagcaattttccttaataaatatataatatagaaacacagaaacatgataaattagcaaatatatataattagatgaaatctgaaaattggaatcgaccatgttacgttggacaaaaaaaccaaagaattttgtaattatagaaatcaacaattccttcatttcaggtcgttatactacaatcgtgtgattgtaattgtttga

SEQ ID NO: 29176 - DNA, 1107 bp, Arabidopsis thaliana columbia
cactagaccaaacgccctctttgctatattaactctaaaatagttcatataatattttaacatgtgcagcttcattagccttttttggcacgagaaaaaaaagtcaaaaacttaacaagctcactgcattgattgctactaatttgatagaagccgctttcctccaattattcaaaacagatgtccggcgaaaaagaacccgtcgccgtcgaatcagccggcttgcccaacggcctagtaagtcatggtaactccaagacacggcgcgtatacgaaacagctcgatctctgcataccggtgctgtgaaagatcttctctctctcggggttcgttttcttatctcttactctcacgttcttagggtttatgtatctgacatattctccgcttcaatctctttgagaattcgatttttcttctgtaatttaattaagtccgtgtgtctccactctgttaggtctgtgagagatgtattttccgattggtatccgtcgaggcttttgattccgatatttcatcagtctcgacttcaactctgcgcagctggctcaaatccggtgatgatgaaactagtgcatcggaatctagctgttccacaatctgcattgtttgtttaggtatattgcagttcgttttttccgatgtcaaaaaagagctggtgaaatcggattctagtagtgattacgttgcaaggataacggacttggtgaagcaggatcgtcatgagttcgatagctttggtcttgaagtctctgtgccatcaactatcatggagaatgaacgtgcactcttgtaagcttcttcgcttgcatcaactaaagattttttcctttttatcagttttgttttggttctgctctagtgttaatgtatctaccttaataggtcataccttaaaggaaagtacagcaccgaagtttggctgcagcgcgataaaatttctgtaaaggatgccttgaaagttctactcttggatcaacttaaagcatcgttggtgagtcggtgatttgcttgaaagtgtttctgttttggaaaattgttgagttgttgcttaggtttcacctttgcttctattgcttagtatcttatacaaatggatgttatac

SEQ ID NO: 29177 - DNA, 521 bp, Arabidopsis thaliana columbia
ggtatctcatgcgaaatctaattaaatcaaatcgatcagtgaataatagtaaattgataaacaacagataaaaacaatcggatcatatccatctccttacacaatttcaatgcttttccctctttttacaaatgcattgattaatgcagtgaaagtgactaaaccagggttgattactgtttccgcttcatcatatgaagaacaaaaaaaatcggaaccccgatgtagtcactttcaatgcattgatcgacgcaataaactggtcaaaaaccgagatcaagcaaaagagaagtactgatcaaagcttcggcagaaacaatggaattttcatagaagagaaggatgagttagagataagtgagagaaggttgtatataaatatgaaggaagaagagaaagagaaaagcggcggagttaggtcgaagaaaacaaagaaaccctaattcagtaatgggcgaagatgtggatacatgcggcccaaataaagtttacaatttataacacgaagctaattaattggt

SEQ ID NO: 29178 - DNA, 401 bp, Arabidopsis thaliana columbia
tacttcccaaataatataataggatttcatttgtgttttagatttaatgtcatatcttaattgttgttcgtttatcaattaaaagacaagtatactatcaatatcttcgaatgtgtcatctctaaaagatatgatatggagccattcaaaaatttaccaaaaaaacaattaattttactggtaaataatatgacatatttggtcccaaatcctaattaaattctatgtcaagttaaatatagtttaatagtaacaaaaggtgataatatcacatatctggcaacaattcataatttaaaacaaaagaagaagtatatctactattttgtcaagtttggaaagcaaatgtaagattaaagaaaccaatatttacagttgttattaattaattatttgataac

SEQ ID NO: 29179 - DNA, 248 bp, Arabidopsis thaliana columbia
atttacaatataatagacaggccaataaaatggaaaaatattatattactaatcaattctaaagatctaagctatctattattgacgacaatagttgatattatacgaaatggtggaaataggcttaacatataagtaaacaaaagtctttagaagtagagagtcctaacaagagtttaaattccggttgctaacgttttaaaagatatgctgatcaagtcgtcgaaaaaaccatatgtgaattctct

SEQ ID NO: 29180 - DNA, 540 bp, Arabidopsis thaliana columbia
tgtatgtcctcaggtttaaacaatttttcatgcatgacttcattattcccatgtgcatgctaggctgaatggggtcctttgcatcatgttcgtgttattcgggagcaaaattctgggatttctcgtggatttgcttttattgatttccccacggtggtatttgctttcaactaatctgttaattccttgcgctttttcttgtgatttcttcaacactgtgtgcatttatgtatttagtctgagcaggatgccgcacgcaccatgatggatagaattgagcatgatggtatagttttggatggaaggaaacttatgttccattacaggtctttttttaaataaacataagactttgattgatttagatattacctatggagggatcatagaattactacacatttaaattattgtttcttgaccgtttcagtatcagagtataacattcttacactaaattgcgtgtgttgtagcagccaacctactggtagggctggtgtgtccgtagcaggaacatgcttctagacgcagttatggtgg

SEQ ID NO: 29181 - DNA, 688 bp, Arabidopsis thaliana columbia
cacgtgtaatctttgtttttattcaataaaattgtaaattttgttttttgaagtaaacaaatattttggtgtgtacttatatgggtactggactactggtccttattaataatacaactttgagaaaaaaaaaagaagtaaacaaatattataaaaatttggactctttcttctcaaacaattggccatccatggcttctttgaaggctatgatctacattgacaaatctgctagaagtacatgattacagataattttacaaactaatgttatttaattgcgataaatcaaaacatttcttttggttctaaattaagttttcgacaatttatatatcactaaaataccataatcctgaatttattaaattgttaaaattctactgaaacatttcttacttcaatttctaaaccttatttgtgtttcaatttccatataactatttaacacatatcatagtctaattgattatgtcatatatggaacgttatgttgaacgcattcaagttcctataataaataagctgttgttttcttttgacgagtttcccatgcacatgtttaattagttctcagtatattgcctttcaagcactatatatataagcatagagagaggtctatggactcactactctcatcataaactaaagttaaacaagaaaagaagtttgagataaaacagag

SEQ ID NO: 29182 - DNA, 646 bp, Arabidopsis thaliana columbia
gtcttcaacagcgacatcaatcaaaccaaggccatcgacctcaacttcgcttttcttgctctctttatcttccattgaacagagagatcgaaatgttgagtttgctcaaagatcccaaagactgaggaagaagataaaattttgaattgaagattagattcgatttgttcccactctttgagagatcaagggtttttgagttagtgagcgcggttgttcactaatgaatcgtgtaatgtctttgatcgactctcgaccgttggatttgttccatttttatttttgtttcttacttttaaaaactaatctcgttgaagcctaataaagcccataaaaaaaaaagcaaacttgacctcatatgggccttaatgcgtaaaacccaatatccaaacatatagccgtcgaccgaaatacgatgaactaactaatagagaattctaagattttgtaattgtataaaataaaacaagataagatttttcattacattaggaaaaaagttttgaattttatttgtatataaagaaaaagaggataaattaaacgaaatcctaagaagacaaggattatgatttgggatggttaatctctatataaacagagcaaatacgtgacttatttttcacaaacacattcataaactcta

SEQ ID NO: 29183 - DNA, 571 bp, Arabidopsis thaliana columbia
cctcacagaatctttatggtccgaacaaatcgagttatttcaaggaaaacaaaattttaagcatgatctcgaagtaaatggtataaataaatatcgaccttgtaaccgacattttgcaaatttgaaggtgaacaaaaacaaaaaagatcgtgaagttgtaattggtaaacataaatatcgtacttaaatcatttcatttaagttgttgaccatatgtaaattacattacttggatttcaaaatccaaaatcatggaaatcaatgttagtaaactacgtcattaaatagtaatgatttgagttttactgactttttaatttatataatttgatgattttagggaagttgatgtgatttattgtaaatttattcaaattttatctaaaactataagatttggatttttatatatttaactaaagaagtcttctcaaataattcagaattaaaaagaatcaaatccacaaacctgttttcaataagagtgaattttaagatagatttttaaatcattagttcaataaccctagattttattagagtttttaaaatttatgattgaatagcatat

SEQ ID NO: 29184 - DNA, 760 bp, Arabidopsis thaliana columbia
acagatttcgattatcagaagagctataaatttcaaatcacttgtttcagagatacaacagtagagttagagagtatacataaacttctctaaccaaaaaggagaaagtccccaggaattgaattccgagagaagacaaataatttcagaatgatcgaacaaggtagaaaccctaaaagattagggataaaaacttagagatctaggttttctgaaactcgaagagctggagaaggaggatgatgataggttatgaagaagcttaccccaagacgccaagtaagaggaaacgaacggcggaatgtatcgaagaagtactcaccggtggcgactcaagtctccgaagcggattctacgtcgaatgttttttcgccgattaatgtactaacctctatttatacgtacgtacgtaattctgtagtgattttttttaatacatagatttgaatttccgtattttgattggtctgtaacggtgtagaccggtttggtccgaggttgttgaaatgtcaatagagttctttccaaaaattttactagacaaaattaagtgaaaagaaaaattagcttttgtgataacaaatgaaacttgttacagaagaacaatgggctaatattagaaattgaagcttaacttgttttagccacaagttagaagctaaaaatgaaatttttgtgataggttcatggtaagaaaacatatcaagtgattcatgtgtatcagaaattgtgagacgacagttcagggttgggtagaggt

SEQ ID NO: 29185 - DNA, 944 bp, Arabidopsis thaliana columbia
tcgatttgttttctcgattagaaaatcatttgatcagacgagatgatatattgtatttttatttcttttatcaaatttttgagatgatatattgtatttttatttggtcaaaaaatcaaaatttctaatattatcaatttatcataataatatattgcatttttattttttttaatagtaatatattatatgtatatgtttagttttattaattattaccgcacccgctggtttaccagtcataaaactcccgcaaacgcacctattatcaaacgcttatccagtcgttcaaaacgcttgataacgcttaaaaccgcaaccaccggtttccgcaaactgtcgtaaccgcatccactccgtttaaaccagccaggccctatattttgcttcttagtggacagtataatttcaagttaagaaggatagaaaaactcttaaagggcctgaggcccgattaagttaagcccaaaactgaaaattaaaataataagccgcataaagtgaatggtgaagaagaaggtctcattgggatttagggtttaagaaatcttccgagaaaacagagagacagtaaaatggtgatgatgaagaagatgaagggaagccaaagctttagacaaagacttcttctttcaacactttcttcaacacctatctcgattgatgagattcgtgccgacgaaacgattcctgtctccgacctcacgaggttaatcttctccgcctcttagaaattgtcaccgacgacgccgtcgttgatattaacgagaccggtaagtaacctttcacctgattttagggttcatgacttcagatttactgattttaggaatgatattgagctgaagctaaagtttcaccaatttagggcttcaaattttgtatctttcagctaggtttcgattccaatcatgtttgtgtttctgaaagcaatacttgtagaa

SEQ ID NO: 29186 - DNA, 651 bp, Arabidopsis thaliana columbia
aaaattatttccttgttattttttatttgcttttggttgtatttgtgatcctcaggaacagagaaacagcgtggaggtagagtaaaaattcaaaaatattactctacagagcaacaggggatcgagtatgtcagaaattcaagaatttgaaaaacttctattgcactcagaggccatgagatcgagtaggtttgtcgagtattagtgatgattttaaaaaccaaaaatttgaaattatacttatactcgaccaacagaagctacaaagacttacagggagtttatcaagtttacagaggattcagaaggttctagtaaaaaggtaacaacgcttcaggacaaacagacagagcgtggcccaccacctcttcatttttttttccccacgcgtttctaaggatgaggaaatcccctccctccttcccaaccactcgatcctaatcccctttcctttcccatcgacaccatctctcttcctctccaaacactcgacctctccactacactcgacctcaccgctcactcgatctcactgctccggcttcaccatctctcaccgctttgtctcccttctcactcgaccacaacacagccctcgccgctcacgccaccgccctctttctctttcactcgacgacaggaccggtttta

SEQ ID NO: 29187 - DNA, 666 bp, Arabidopsis thaliana
aaaaagactggactggtgaccgtggccaagtcttccagagccccctcctccccaactcaggacttcacctccatctgctcaagaaaaagataccctcagatttctccgagtacttaaaagacaaaaaggtgttttcttctgtatccagataagaatcgaggatccaaaccagtaacagcaactgaatgctctgaacccaaagccacggattgtatggtgatgccatgcagagcttccactttagttggtacacgtaccactcttgcagcctcttcataagaaaaaaaatgtataaaggaaaagaacatgtaaatagagcaagaaacttgatgtattaggacatgcatagcagtgcataaatgtttgaatggaaagtgatgtactttttcccagtccaagctgtccacttgagttctttcccacatgtagagttctccatcaactaatgaaatgaaagagagcaaatatgagtgccatactatttcaacaagatcatgtttaaggttcaggttatgacaattcaatgaagaacattgtggttactggttgtgacctgtaatagcagcggagtgataataaccagctgaaatgtgcagaatatccttatcgagtccagaaactgcaagcggatcctaaaatatcaaagttagaattgaattatctgag

SEQ ID NO: 29188 - DNA, 815 bp, Arabidopsis thaliana columbia
aattgcaggaatgaaaagcggctgctgaataatagtgcaaaattcgtgtctctaaaagtgcatgtcccagggcgaaacccttagagacttatttatactaaaataagaaagcgggcttcgagcccacttaacggcccatgaacggcgtgatcaagagtgtcggctcaaagtgggcttcttgatgggcttcgaatgggtttcgaatgggcttcgaatgggccttctcttctcttctcttttcgatgctcaggttgtctggttgagtgcggattgataagagggtcaaggtggtggtcgagtaggttggttgacagaatgatctgggctgcttcttggcctctgtgatcgagtaagtgtgtcagcagtcaggatgtactggttcttcacctctacgatcgagtataactggtggactggcaaagtggactgcatggtcgcctctgcgatagagtagaattgtagaatggattgcctcctctcctctgcggtcgagtatatctggcagaatggactgcctagtctcctctatgatcgagtagaagtgtctggatggactgcttagctgactacttccctctcagctactggtgatcgagtatgtttggtggaagtgtgactttctgttctgtttccctctttctgagcaccaatagctccaaaacacctgaaacaactccagaatgtagaatgtatgcaagattagtcctagactcgactagagatgcaaaatgtacgaaaatgatggtgaatgctatgaaagatggatgaaactagactcaaaatggtgattaaaggatgtgtaaacatgcaaatta

SEQ ID NO: 29189 - DNA, 603 bp, Arabidopsis thaliana columbia
cagtgtgctctaaagagactacagatgaagaccttccccctccagctaccatcactcacccgcgatctatcctccgccgcgactcctctgcttccttggttgctggggttgaagaaaagactgagcctactccccgacgaaggagaggccccatcatgggcacctttgttgcagaccctcacaagccagttgccctagtagattgcactggcaagcaccttgtgattattcctgcgtatgcttcatctcgccatgactggcttgagtcagcggcgaccagcgtttgcggaaccgcgaataatagcccacgagcgacgaccatgcatctgattgacgagagcgacaccgacgcgctcatctcgccgaatatggatctcagccctatgttggcgtctagtgctaacctaatgatgacggctctgggtaacgatattgcaccgggtggccaggtcatgggtcccccagaagcattttatccgtctcgcgattttgcgattgacagctcttttgaagaagacgacgaagacgaagacccgcgaagcccagttgaacgtagatgactttattgactttggcgatggttctccgacgaggacttgacaa

SEQ ID NO: 29190 - DNA, 103 bp, Arabidopsis thaliana columbia
gtcggcaaaaccggcggcgctgcatgacgaagccgtgacgatcaccgccctgtcatgccatgccgctagcctgccgggctcgatgccgaccttcacgctttct

SEQ ID NO: 29191 - DNA, 613 bp, Arabidopsis thaliana columbia
cttttaagtgttaaattttaatttttatgtaaactaattagatacaatatctaaatccctaaaatattttggtttttaaaaaatctaagtgttaaatttcaatgcattgagaacaaaccggattaagcatgccgtcccatcctacgggtccgtaagccgtgttattagttcaaccgcttttcacgcaagtaaatttaacactaagattagtttttatgattttttacaaatatttttattaggtaaactatcattttacttatacaaaatatttcttttttaattttaactaaatgtttttagtatataaattattttagttttagaaaaatgtaagtgttaaatttcaatgcattgagaacaaaccgggttaagcatgctgtcccatcctacgggtccttaagccgtgttattagttcaacggctttttacgcaagtaaatttaacactagattattttttatgattttttaaaaatatttttattaggtaaactaccttttttacttatacaaaatgtttttttttttaattttaactaattgtttttagtataaaaattatttgggttaaaaaaaatctaagggggtgttattggtttgtgatttagaat

SEQ ID NO: 29192 - DNA, 298 bp, Arabidopsis thaliana columbia
gaggatatacgatacattaatgagttacattatcccgaaaacaaaatcttgaaaacgaacaaagataatttggacattactcgttatgtatacgtatggaattggatagagccgttgaaccatcaagtgggtcttcaagtcaacgaactgaatttgattttacactcatgtacatcggccacaattttattcacacactactaacacctctggtgtccactttaaaatttctctagattgatgtgttaagattttagttgcaattcatttattcaggtatttttatatatatataaaa

SEQ ID NO: 29193 - DNA, 495 bp, Arabidopsis thaliana columbia
catcaaattgaagcttcttcaaaaccagtaatggcttctttagagtcactttagagcctacgagttcatggtaacccaccgtgaacgtgtatgttccctgcgccagaaatctcttaatgaaatctccggcgataacagttccgattagagaaatgaattttgaaaaaacaaaacctgtgaggaatcggagtggcagagacgaccgatctcgagattctgaatagaaccttggaaggaagcttgagtctcgacgactccttgaagctctacgatcgcccattcgctacactcttcttctccacatctacacttcactcgaatctccatcttcttcttcttcttcttctccgttttcttcgaattctatatattcactttatatatatgtatgtatataaattttggcggaaaattagagatctttcgccgggcttttttcgtttaagatgacgtcaccatcatcttctcaaagatgcattcaaaatttgagaaaga

SEQ ID NO: 29194 - DNA, 334 bp, Arabidopsis thaliana columbia
tctcttttgtttttgttaaaaatgtatgactgtagaacttttagaccatgaggccaaacttggtatgtgataccttttcggaaagcccacagagagctctccgatgaatgaggaagcaaaatggaattcttctattgtttccgtttgtctactccaagttctggtcttaatgtacttcgtcgtgcatttcgtgatcgttgctgtattccagggtgaaaatcatatgtacggacattgttttcgaggattctccacgtatgatcgctcttataagcgagataggctattcctacctagatggtgggacccacggctcttggatcataaagtcttc

SEQ ID NO: 29195 - DNA, 708 bp, Arabidopsis thaliana columbia
cacgcactgtttgaagaccttccgaccgcctaacccaaaccagaaatcaaacatgagaatatgtcaaaacgcgcataatttacaataatgaagtaatctaattttaaggtttgtcacaaatggttttgcttctaatgctaataccatatgtagtcaactgtccccattgaaacatctgtgataactggtcactacaggttctccgttttcatcccttgtgtttgcttgaccctaaccacaaatttcaacagcttcctaaggatataatttctcaagaaacagaagataaaagggaaaaactgtagggaggatatattacaatacctccacttctgagtatgtgcttttaagctccagagcatgttcaaccgtagttctctctgggtcaccagttgcagttgctatctccattggagtccaagaggatggactataagtgattttgtcactatttaaagcttcagaactccatttaagtggaacttcactcacaagttcccctttttgactcaagttttcattgttatcgtgtagcttagccaaaaaggtttccccatcttcacctaaactttcttcatcttgcgcgaatactactggttcgtccaattttaagccatctagtttcatttcagccacaaaagtgtcaaccttggtggagagactagatgaaatatcttgatcactggaacatatttcctcaggagtttg

SEQ ID NO: 29196 - DNA, 475 bp, Arabidopsis thaliana columbia
ctctcattctcaaaaagttcataatgaagcccaaaagcccattactaatgagggtaacttacacatgttaccttcttactgaaccaagaatcgcctctccctttttcggcgcgcgcgtacaccttacactgttacacagttacactacgctactatacactctgcattaggattcttttgaagcgcacatgacatgtctctaaagttcatatataaacgtgtccgagacaatttgacagcgtacgtgatatgtgttcgtttgttgacacagcttgagattaatggcttgcggttgcgggcagtattgttattaagaggtgttgcaaggtttaaagtctaatttgactaggtctacttttaactcataatcattcagtaatggctaacttaccaatggttttagcaaatcccaacaaaaattttttttaaaaaaaacttgagaaatacagtgatcaactaagtttgaattcttgaa

SEQ ID NO: 29197 - DNA, 518 bp, Arabidopsis thaliana
taaaacataccagaatatttaaacaaaaacagaacgaatattattaaagaaattacgaacaaggaaacacaaacataacgtcaaaccataaactgatgacgaaaaagacgataagagaaacacagaaacgacatcaaagatccaaacttaacacaacgaaacaaaacttcacttcctcctaaacatcttggagttacatactacataggaaccaattaatcatcatgatctgtcttaaggagaaccaccgcttgaacttggaacaccaccaccactaggtccaccaccgagtccaccagggaaccccattgcaccacccaaaccaccaagcccaccagccccaccaagaagcggcgtcccactcgggagtgggaaagtcatgccagagccaccacttccaccacctggcatccccatgaatccaccaactccggcaacaccgccaattccaccgccgtagatgaagttcttctggtcctcaagaggggcattaaccatatgaggctcatctttggtag

SEQ ID NO: 29198 - DNA, 731 bp, Arabidopsis thaliana
tttctgtataatatgtaatattactaaatttgccattgttgcctcaatactttcagcagccaccaccaccgccggccaccatctattccggccaccaccaacactgatcaccatcaactccggccagcaccaacttcagccaccaccaccaccgaccaccaccaccgccaccatcatcaccggccaccaccaccaccggtcaccatcaccaccggccaccaccaccgccggccactaccaccacagcaaccaccacaccgatcaccatcacttccgaccaccatcaactccagccaccaccgccagccaccgccggccaccaccggccaccactactacaatctccaaccaaagaaactaatttaataattttactaccctttagtgttagtttctacatttgacatattatagtagtgttagttttttaaataaattatcaaaaagtgttagtttcgcaattcacccatatattaaactgaaaaaaacaataattttttctctcacattaaattaaattaaatatttttttaaaatacaaaaagttaaaaaaaataacgtagatcaatatatgaaactgaaaagaaaaaaaaaacatttttactcacagtaaagttaataaatattatttttaaaacacaataaaatgttggaaaaagtcaaaataaatttcgtttgaatgtgcatttaataatttggcttcagcgccgacaaacacaaaagctataatt

SEQ ID NO: 29199 - DNA, 451 bp, Arabidopsis thaliana columbia
aaaaaagaactactcttattcaatgttaaaaaaatcgttaggcgctagttaggctttcgatagaagccttgagcctatatcgatcagtgcctaggtcaattttttaaacattgttcccattcttatgggctcaaaaaaattaggtagaaaatttgttcttccaaattttgcaccagttagactctaagggggtgttattggttcctaattttcatgactttccatgactttattttgtgaagaaaaatgtagaaagaaaaaaagtgtgggtagtttatagtctttccattataacaaaaatgtataactatataagataatactagagagctgtgtaaatcacctaaatactgttttaggaaaaaaatatcttttgctaagacaaaacttgcaaaagatacatctacacaccatcacagcattgattacagtatgtatgtgtatgtgataa

SEQ ID NO: 29200 - DNA, 1505 bp, Arabidopsis thaliana columbia
tccctctggttatggataaattgtcgcaaacaactttttatctatatttaccttagctaaaaatgtaaatactcattttcttctttacaagttttaatatacttcctactaaatatttataatttaaggtttttgcacataaattaaaaaaatatataaatttcatttaatttatctcttttctataaaaacatcattaattataaccaatccaaccaataaacaaatatgatgtaaaatataattcggttaaaaactattaaatacatttaatatttacatagaaaagtgaaaacaacacttatattgaaaaaaataaaaaacctttaaactacatttaattaaaaacagagagagtatatatattttttgggatgtggagaaataggcaagaatgccaccctcgaaccgtagcaaacaaagattttatggaggctgaggattaaaagccgaatggataatgtccaaaaccaaataagaccacaatgatgtaaaggccaaataagaccgcgtcaaaataagaccaaacccaaatagattatatttaattggatagtcatagaatctaaataatatatttttttatttttttgttaaaatcacagaatttattttctaacaaaattaaagaattatattttctgcatatcagaaaattttatttttcccgcaaaaagtgtagaattaatttttgtagtaaaaatgtcaatgtaaaccctaatttttaaaaaaataaagaaaaacaagtatctaatatttttttttaaatgaccactttgaatttagacatgactagacccggaccattttaatttgaactgatttaacccatgattttggataaattgtcgccaactttttttttttacaagtttcaagatttttctattgggatttggggatatatgagcaggctgaggattaaaaaccaaatcaaactgtaccaaaaaccaagattttatggttttggttctaattcggttaataggatttaaccaatcaataatttcagaaccaacgagtctcaaaaacaagaaactagttagtatttgaatttttagtttagatatttcctcaggaaaaactctctctcttctctctcaaaaactttagagagagagagtttgattttcggcaaagtccgatcatgatctcatatggccgttctaacctcgccgtccggtttatccggctcctgtacagcatcgactagcttctaaagtagtgttggctggcttttgtccggcaattttgccgtcctgtttacgatgtcttcggctggctttattatctgagttggtgatgctgttttaggtgttgtgtcacttaaaagatggatttctccggcttgtttcttttgagttctcggtttgtagaagtctttacagagataatgtcttagtttgaaggaaagaagaatctttcaaagcatattatgattgtcttaaagctattagtttctttttagagtttcgattaacttagcaacggtgacaaacaaagga

SEQ ID NO: 29201 - DNA, 1128 bp, Arabidopsis thaliana
  unsure (1)..(1128): unsure at all n locations
attttacctcattttgaaggaaccaaatggttactctataccactcttggtatttctatcgtcatgcgaggaggtatgtatgtttttctatggtttaagctggccaaacacatcttaaggaagatagatacggaaagagaccctgatgaggaggccgcaacgggaaaaggctatgtcatgtattggaaatcataaatccgagcacctatatcttaagtttattttgttagatatctattattgactaatgtatacaattaggttagtgatgcagggcaacttgtgttgctttcttagtttgttttcctatttcatgtttgatttctataaggttgtaatgtgtgatttgaaggcttgcgtgacttatatagccttcatgtgtggtgttaatgcacgaattaaacaagtacgggtgagtctctggggaaggtgaagaatcaatctctaatccacgagctgaacttgaagctgggcaattgacgggctgaaaggcttattgcgaactgagagcgtagttgagggcgctacgaggtgatgccgtttcgagctggtggttctagtgagctggctcttctgggcgagctggctgatcttcgacgagcagacttctctcgacgagctgacttgtatcgatgagctggctcttctgggcgagctggatgatcttgacgagcagacttctctcgacgagctgacttgtatcgatgagctggctcttccgggcgaactggctgatctgggcgagctgacttgtgctatcctttctccaggtcccgaaaaacgtcccttctcccgagactttctattccttatttatacccgtccgtatagtagggtacgcaaggtgaattcccaagagtgccccccttttctacgcagctgaactcacatcctgaccaggccgggcttcggctgcnatgggccggctcgagttctaaagtgatggtcgggctgggtcgttattccttgaaatgggccggttgatcactgaggccaattgatgtacaacaggttgttccgataaactaacagttccatgcgcatagcaacgatttgaactcttggcaaaatacgtgattagagatagatanactcaagatacttacctagtacattcttataaagaga

SEQ ID NO: 29202 - DNA, 656 bp, Arabidopsis thaliana columbia
  unsure (1)..(656): unsure at all n locations
cctttcaaatttggatttttggtttggatagcaaagtagctaaatagattgctatgttttgaatcctaatgctgtctttttgaagtgataatctgaatctacatatacatttttgcagctattttgataaataaatcctggagttggaacttatttacaatggctgccactggcttattcaattaactaccaaatcaaagcaaatcttattcaaaggaatatgctattattccatggcctaattatttttgccaaaatagttaaaatatttaaaaattaaataatcatttgaaagaaaactttaaattgatttaaattataaatcttttaataaaaatattattaaaaaaataaaaatttattttaccgaataggattagatagtaggactagatggtaggacgtgtttataatattataatatataaactttacaacaattaaataaccattcaaaataaaacttttaaattgatttgaattaaatattttttgaattaaagtattattaagacaagaataacaaaataatgtctaattttaccgaacgggtgtagtcatnaggcgggtttggtcgatagtattacaagacaagtgaaatccattagatatgtttaatttcactgtgcaggattagatggtatgacgggtttgga

SEQ ID NO: 29203 - DNA, 555 bp, Arabidopsis thaliana columbia
tgacaacttcaacgattttgggcgtgtaaagagagatcgaggagagttcagggaaagagacttgagggtcgtagtggtaagcaagtaaagcgtatttgatccagaggaaataatatggagagacttcaatgtcgtcttcaagcaagagaccaaaaatcatcatcagaagctggataccaactctcgctcacagcacggattaagcctccttggatgattcttcttcttagtgtttttggtccatgaggccaatcgaatgtgctcactacattgatcgtctcttcatccactttgctatccatgttgaagctgagtgatattttgtcaccaaggtagtatgcattgctcaaagacctaagcaatcttaataaagattgagctcggttttgggtgatgatgttcactgagactctcatcttattccagtctgaaatcaagacatttgtcagtttcggtaaattaaaactggaaaagctatattaaaggcaaaaagttgatacttacttggcaatgctgttgatcttagatcagccatccagagaaccttggagatag

SEQ ID NO: 29204 - DNA, 578 bp, Arabidopsis thaliana columbia
tccaaaaagcattgatggtgtagtcgaagtccttatgagtttttagttttagatcttctaaaaggaaaacactaatttagctcctaggatccggttgtagttctagttcttatactcaatcatatacaagacatctagtcatattctaaaaatgcttaacgaagccttttcttgtttctcaaagcattgatggtttagccaaagtccctatgagtttttgtttttggatcttctaacaggaaaacactattttaccttctaagatccagttgcggttcttattcttatactcaatcatacacacgacatcaaattatatttgaatccaaaaacactaaccaagcttcttctttcttctcaaagatttgatggtgtagcagaagtttgtctgagtttctggttttgtatcttctaaaaggaaagcactactttatcttccgtgatccggttacagttttggttattatactcaataatacacacgacatctagttatatttaaaccaaaagcattacgaagcttcttctttctctcaaagatttgatagtgtccataagtttgtctgagtttttggttt

SEQ ID NO: 29205 - DNA, 554 bp, Arabidopsis thaliana columbia
tcccctgtattcacattaatttcgccattttttctgtgtattctagtaccagaatgtctcaccttactagctaaattgatttatattctagggatttaaattattgatgttgttgaccaaaacgaattatagatgttaaaatattcacatcaaaatattcttaaacctaactaatgtaatgcatgcaaactgaaaatgttaattataatatcatgtaatatagtaattatatgtgtggaaaacttaagctatataataacgtacaaaaagtatactcagtgtagacgactaattaagacgagtaaaatattaattccttcactttgaagttgcttttgttcgtaggctgcaaccaatgctagctattattatcgaagtcacagaatcatctagaaaatttcgtcagtcatcaccgtcgtcaaatttaaactgaaaagagacacaaaactataataaatgtgcaccaataattccatttgaatataacagaaagtaatatatattcatcagtttattcgagtaatttccccctaaagaatatatatttgacaata

SEQ ID NO: 29206 - DNA, 1409 bp, Arabidopsis thaliana columbia
ttgcttcttctaagaccgaccatgaaaaagtaaaaccggatcgataataactagtgtaggttcgacccaaaaagcccaagatttgatccagcagcatgctcgcgctacaaaaacaccagctgtgtaatccctaatatttttggagcgaagactaccacataaatacttgggacaaatgataaacagaaaactggacacgtaaatccaggttgaaaaagtcaaaatgtgtctttaaagattattaaaagttttggtcaatgacgataacaattctcgaccaatttggtcaaagtatacgttctggagtctgacgaaactaatcttaaatgttaatcacatcaagaacagaaattggtactaatcttagaagaaaagtggtactaatcttagaagaagtaaaagcttgaatctaaatgataaacgactaaccttggttagtgttatcgtcgcaggaggagttgtgaggtctgtccgcacatagacaccggaaactctccgaatctaacgccgaaccacaaatcccaccggaatcaatgcatctccggcaagctttgtcttccatgatgtacctcaaatcgaatccttttctcaaagcttccacaaaagttagttcggaccgttgaagctcgtccttagcagacctcagcatcggaatttctgcatatttcatacaaccttcgtcagaatccgacgatcgcaagacatgatatgtcaccggatcctcgtagctttcttcgcaagaaatctgcaacggagctacgccggaacagttgacgaatacatcgatcgtctcggtgttggagtctaatgtgaactgattcttcccgttgaagttccaaatgtttaggcaacctccgtctagtagactatcatcggcaacggaaattttatgatcctccagattcgcagaaacaacgcgaagagtgatgttcccgatcgctagggttaggttttgatcaccctcgcaggagagtttgaatgacgaatgaccgcagaatttgggtttattgaatccagcccagaacggatacgtggtactctcgaataccctgtgtccagatccacatgtcagattacgtgagcgacactcctcgtactgttgatcggctgagaagcacgacgggaggtcagcgacggagaagacgacgaagctgatgaagacaaaaaagatggacattgggttttgacaactaaagccttctttgttattttttggtgagaggttttggggattttatggaagattggtcaaaatgatcggtgacgacttttattaattacagtccggcgaatttaaaacagattatgatcgctgattagtgattacattataactacatcctaaatagattatttatgtatatgaacggtcagagattcatacagatctttaatggtgatttgacttg

SEQ ID NO: 29207 - DNA, 1096 bp, Arabidopsis thaliana columbia
cttctccttagatattttattttaatgtctttaaactatttttttgggttaacaaatggaacagttgcaataaagggatggtgattgctgattggtgttgatgggttccataccctttggcatgggagaaggagatagatagagctagttgcttgctactagttgttatggacgttctcatgtttggataagtttctccagtaataaacaattgttactctgtcaaaagtatgcattatacgaatttgaatttacgcattcacgagaatagctcaaaccttattcaatgaataagagcattatgtcatatgtcacaaaatcgtcaaattacatccactctttttaaaacaacatttcaactcgatctaataaccatacaaataaatctacaaatctcatgtgtaccatcactttcaaataattttgtcatagttgtaacatttcatcatagttgtacatagaaaacccacctcaaaatatgatattagcatatcaaatagcacatttagagagaaaaaaaataaaacttatttgttggttaagaacctctagtaaggtgaaagagaggcctcagcagcagagaaatagaagaaatagtagaactgagagacaatggcgttgaagaagacgaatgaggcgcctgctgcaaagacgcctttacgtagagtttgacaatcaggaggattgtccatgaacattgtcctgtactttgtgtggtatgcattctctaccgatccagctaatagacatatctccgctatcaagaagaacatcctttttttcgccaacaaaacaacattcaagttgtaaaaatattagcacaatgtcggttgtttaataagcacgtttagcttcataacggattaagagacgcatgttagatttgaattattaactgtgcattgaaaagagaatgaaaatgtgtaagctgataataagatttactgcgattttgataccatgatagattaatgataattctagttctataaactaagatctattgtaaatgtttgattgtgagttttgaatcatctttgaacgaaataaaaacgccagatatgtctaagctagcttaagctagggatatatatgt

SEQ ID NO: 29208 - DNA, 575 bp, Arabidopsis thaliana columbia
tgagtaagaacctttcagcttcaaatagataataccagcaaggattccacccaaatgcccaagaaacgaagcgttaggtacaaacatctgcactagaatcaattctgcccaagcagcatactttgttggaaccaagataccatacacacttgagtaatcctcagcttgagaattaagaacaactttcatagcaaagagaacacccgagaacccaaccgcatactcgttgtagtaagctctgtcatagtcaaacaagagaagaagcgatttggctaacaacaatgtgactccttgagacataccaataagagtaaagaccattgaagcaaactcactgcttcccattgatgtctcaagcttgatacctttccagagaagtgacatcatgttatagactaagtgaggctcgttaacatggtagaacgctgatagaaataaacgcttcaagtccttatgctgttcaacaaatacacatcaagattaaaaaaaaaaactttaacagagaatagaattaatcaatcaagaatgatctaattagatatcgaagaacaaaatcctaattctccagatattgg

SEQ ID NO: 29209 - DNA, 926 bp, Arabidopsis thaliana columbia
gaatattttttagagttatatatatctaagcaatttatttgttacattggtcttgtttttatatattttattttaaattaaaaatacaatggaaatctctctctctttcgcactaagcggttgctgcataggatcgcgaagaacagagactaacgacgaagttattttacacattgttgccattgttaattttggcccaatatgaatccgcccatttgttttttctctttgtgtctctgttaaaatcttagaaactactctttggttttgggaagatttcacttttcaacgtctcttcgcgaattagctaaaaagagttggattataacaatattaacattgaaagtacgatatgcttagataattaattaaaaattggattttattgaaaatataaatttccttacaacagcaaggaaagacacacattaaagcaaaagaaataagagtaataactttgttttgagtctttgtgatagttcactgcctcaaacattatagggaattttttaaaaacagtttccaactctctagatgttttgtttaagttataccataaaaataaacttaaacatttgtttgtagaaaaaacatttctcacatgtgttgtccaaatttcttggatggcacacgtcggggggtttcatgttgcgaagtgatatcatgtagcatctttttctcgccactctaatcccatttagtgaagttttgatttgtttccaacacgtttcagccatggtggtgtcttagcccattcaagttggctcatataggtttttccctcttcagttcttcctctacataataatagcatggcatacatgtagattgcttctttctggcctccgttagctgctatgccaatatggtggagacaacgtcacaatgatcaaggttaaagtacatattataccttttatgtagtg

SEQ ID NO: 29210 - DNA, 944 bp, Arabidopsis thaliana columbia
ctaaccaaccttcttcttgcttctcaaagctttcatggtttagctaaagtccatatgagcctttggttttgtgtcttctaacaaggaaacaccacttaggtttttaagatcgagttggggtttaagttcttatactcaatcatacacatgacatcaagtcatattcgactccaaaacactaaccaaccttcttcttgcttctcaaagctttcatggtgcagccaaagtccatatgagtctttggatttgtgtcttctaacaaggatacactacttaggcttttaagatcgagttgcggtttaggttgttatactcaatcatacacatgacaagaagtcatattcgagtccaaaatactaaccaaccttcttcttgtttctcaaagctttcatggtgtagccaaagtccatatgagtctttggctttgtgtcttgataatttatttttagtcaattatcctaaaacaccaatcatgtcattgtagtattttaggttgtcaatccaaatgggtgtgatgctaacaatcaagatgtgatcagaagtcactaagtcaagccaagcataacaggttttggtgtgttctagcagtcctaagtgaacatgcagaaaacagaaaatcaaacagaaacagtaaaacacttgaccaacacagctctttgcagagctctgggtgaggtcgagtgacaggtcgagtaacagacaggaaatgaaacagggatactcgactgcatagtctgttgctagacaactgggtggtcgagtatcagatcgagtaacagtaaagaattgcagaaactaagcaacagatgacaggatgcagtaaacagtagtagagtaaacaataaaatcaatcagataaagaatttctaaggatgggataattgagtagtttcgtttcctcagtttacaggtgattgacatgctcaataaattaaccctagaca

SEQ ID NO: 29211 - DNA, 1195 bp, Arabidopsis thaliana columbia
ctcacctttaggcaacctgtctctttagatgatgcttgtaacgcccacgaatcgccctatggcggacaagccacgggtgacccagttacgctacagtgaagatgatcgaccataacttagtaaaggttccaaatgaatccgatttcttaaccaaattataatcgaccctcttcccactaggaacaccacttaggcttgccaaccatcatgatattctagtgttgagcgactcagactaggtcttatatcattaaacactcggctgcttttacaaaaacactttatacatagtatatagcttgtactttgcaaagagttacccaaaaatatatctttatatctccttgttaaaatttacataataacaagtaattttgcagaagcaacgcaaaacatcttattttcggcatttcgtagtgttcgtcatccgctatggtcattccactatggttttctgtaagacaagtagaatcatgagtaatctaacattacccactgagctgggtctatgcacaaataaatctctagggtttaatcaactcaataagtaaacttaaccatcagagatcacaaagcacgtaataaacatattatcatattcttataataatactagaatatggagccaaattagacacatgaatgaaccttgggcccagcatactgccaaccttaccaaagaggtgcaccacaacatcagcacaaactcccgcatacatgtatacatgttctccacatgtatgctaccacacacacgtacgtgcacacccacaccacaaatacgtacataactgtgaacacccgagctatagccacaaaggcttataaccggaacatcactttaatgcatcgtcatgcattacccgacatacgctccgagtcttgtgccatcatgtaagtgaccactcaggatcaagacttactgacacaatcataacacaaaaaggaagccagtagcttattctaagcatgatggtatcgggtaaacctagaataccacttagacacaataacctcatgtagtactatatataagtattttaccacaccccaaacaattataatacaatcaagaactaattcacgtatttatagttatacataatatatcaaggacttattcacaacctcatagcatatctcatataagtataacaatctaacaaggcaagtaagcctcgaatcatatcttaat

SEQ ID NO: 29212 - DNA, 728 bp, Arabidopsis thaliana columbia
ctaacagtctcaaagtaaaaaaaagttcttcattatgaatagaagaaataatcatatatgttcctccatgttataagaagttgcgtttcaaaagtgaactcctaaattataaactatatgtacccaagtctttaactaattaatagtagaaaagtatatatgtataataatgtttggaatatatagggaagataaaggaaaatagggaaaagagatattgattttgatagaagatatacatatgaccaagtgtcgttagctcaattggtaaagaccctaggcgaaacttagagatcgccggttcgcgtgacgtttggaacgaaactaatattgcatattgtggtttcggacctaggggattacgggcttcggcacaaaacttcctggatttaaaagaaaaaaaaaaaaaaaagatatacatatgacatacgcgtgcgacatggattctgattaaagagagagagcctcaacagtcaggtcaagatactcgaggctctcgcattactcaagactcatgagttccgtaaacgtacatatgtggacttaatcgcccttcaaatgcgcagatattgagacccccttattcgagtcgagtcatgggctttacgttcacagtcataagttttcttagtttaagatactgtctaattgaaacgtcgcgaagttatgtgcgcaacatgactcttgccttgtagcgatcggaatattaaaagtatcattcaaactaa

SEQ ID NO: 29213 - DNA, 1077 bp, Arabidopsis thaliana columbia
ccaacctcgcttgaaccaaaactggaggagtcttctcctttgttgtgacatatccttatccggtgcagcataactcaacaaaggatttacaccattaattccgaactctttcgaaatcgctgacttaaacgctcccagtgtcattccctcagaaattggacaaccctagaaaacagtgtgttacagatctccagtttccactctccattcgacgaacaaacccaatctccacaaattaccatacaaaactcatccatcaatccctaaccaaaacaaaacagagcattcacgttaattacctaatagtgtaattgagtatcgtaaacgtgttacgatttttaaggatattttttcattgtaccttcgtcgacatcgaaataatgactgcattacaaccgtctgtaatcgtcaagtaactcctttctttgtgtgaagatctcaaccgtctctttatgcactgagtggatacgttttttttagataccgctacaaacctaagcaagataaccggttaactaattgattgatcatattggacactcaacaatacacaagtatgaaacactcatcaattgtacatgtttttttttttgacttattggacattatattgtggacataatattgtggatatatagaaaacaatcagtataatgaaaagttaaaaatcagtaaacaaaaaagaaaacaaaccaaaaaccataaaacattgtggaaaaaattttaaataatcaaaaaaaatcttcaattcattgtttgcattatacactcacagaggtgcaagtagagctgaacattttgggagaagcatcaatatgatagaagacaaaattatttggaatcctcttttttatattttttactaacatggttagaagcatcaacatcactaaccaatataaatcatggtttacttttttatattttttgggtttgtctaaaaagtccaagaaggaaataaggtcaaaaccatgaaagatataatttacatccctttacatcaaacataatcaatataacagtttaaacattcgacgatactggacaattatcagtggacaaatatgataaaatagt

SEQ ID NO: 29214 - DNA, 1159 bp, Arabidopsis thaliana columbia
gtcggagggctcttattgcttgtttcactggctaatgtggaatatgagtcaagacttccagcgctcagaaggcgtttcatgggcgttggatcctattaatttcagagatatctgcctctaccccaagggattggctgtagagagggtattggctttaacaagttgattcgatattgcctgcttagttagagatcgctaatgggaattaggtcagtgtctagctttactcgaggatttctatcatgggattgaattaatctgttgttgaacttgttgtctagggatagcttctgtgaagttttatcaaccgataaccaattttttaatgttatgacagaattgttttatgttacaacagattcttgtaattttacacaatatctgccgtttgatggcaaatttgttttttaaaatataatgtttttaaactattcgataaccccatccttaggaatcatttatccatttgactgcctgttatcatttctgctttgttattcacctacctgttattgccatttttgcttttagtttcatttcatttctgtttttgcatactaggactattagaaccaaccaactctctgcttggcttgacttagaactttctaatcatatctcatctgtttgcatcacaccggattggattgacaacctaaaatactacaacgacatgatagtgttttaggatttattgagtaagaatcctactatcagctagacatatcacgatctttgcacgcttatggtctttgcctcctaccacaagcaccacgtaccaagatcccaaaggttaagatattatgaaacatatggttaaatcaaacacatagaatcatcaatatcccaacataacctcccaaccataaacattagcataagaatctaaagatcacatatgcactcaaatataaccatttacacaattcatataactcacgaaatcaatttagaatgcatgagaatatgattatgcaacttaaaccattatccagaactcacttagtaaccaacaggaagcttccaatgattcaagcagagttttcggctatgggaccgtaacttgaatttgcagacggtttcaattcggcagcctctcacttttgctcactttctcttcacaaaacaattggggtccagtgcggcttatatagacaag

SEQ ID NO: 29215 - DNA, 704 bp, Arabidopsis thaliana columbia
gaaacagaattatgaatatccgcattctcattattacatgtaaaatttgctaaaaccgaaagacacagagatactttttagggttgttgagagatttctagatgaggtatgttcataagcatcattattttaatgtgatttgtgatgatcagtgctctcaaatcacttttgcatttctccatttacatgagctagctcctacttgtggctttatgtaaatcctggtctacacaagctagagattccattgacgagtaccatggtgatgccttttttcaaagcaggtgttcctgaatgctccttcgttagttccatgcctcatacacgaatggtattcagtgcaggatccaattggacttgattccttgacagactttagcttttctttaaaccaaaaaaagaagaatatctctgctagcttctcatagtctgctcattattgggatgcactatcttcgtagagggaatgtagagttgtacatataaagtggttgacttgggacgaaatacccacattactgtaaaattttaaaaatcgtgctcgaatatcaaatttggtggtcatctcaaaacatcccacaagacaatataaggagtgaaaaaaaatggaacctgtcagaccgccgtgcaaccaccccggcaaggtagaaccgagccgagtaacgatcctctacagcaccagatgcgtcctaagacgatcgtag

SEQ ID NO: 29216 - DNA, 435 bp, Arabidopsis thaliana columbia
tgaaatgatcagattgtttacttttcttttcaaatgaacaaaaaaccacaagatgataagtattttgaaccggtaagagaaacaagaagatcatataattatgtgtttggacaattttcattttcttaatcttgttctgaacaacggactattcatgtgtatggataataaatgtgaaagtaagaagagaaaatttataaggtgggaaacaataattttactgacatgttttggtgtttgaggtaagatcccatcttcattagtagtcactgtcccattccacttggtgttttgcatatgttttaatatccttctttcataaagtcaatagttttgtagttaattcagtgcctggtctgacttctcgacaaatctcttctatcgttcattttggatttctcgatttactttaatgattgcaaaacattgaatcga

SEQ ID NO: 29217 - DNA, 370 bp, Arabidopsis thaliana columbia
cttcatcttactattcctgtgtacattttcctttcctctagatataccctatgcacacctcaccaaaaaaattataaccacttatattatacgaatgccaaatctcgatataacaatttaattaaagtaataaatgttaatgaatttaggacatttcaaccatatatttactctatcaccaatatctacatcttacttgccccatactcacccttaattagtacgaacagaaatttcaagtaactacgagactctcacacatctgacatcttaattctcaaaatattcagacaaacaacaccttttgaactttaaacgatccacaacaaaaacagaacaattgttatatatatatatatatatatatata

SEQ ID NO: 29218 - DNA, 1291 bp, Arabidopsis thaliana columbia
tgtatcatttgcactgtggaaattgagcggttttttcatggatgggtaccaaaacctttttttgttttttaccgagagcttttttactttttactctctaataaagatgaattcatttgttggaaaacttgtattactttttactctttattcactgtattacttgtcttgtcttggttgtgaagatttagattttgtaaaaacgaaattgaaacaaaaaagaaaggagtggatacgtttggttaatttgtatgaaacattttgggtactaatttgtattggaatctgagattgatgcttttagagggttttaaaatgatcaaaaaaggaaaacgagggccacacttcgtaaattttgtgtaatgtctacacgcgatcgacgtgaatatgaatggttgactgggttttttcaaaataaaaaaaaagtcaggagttatggggcccatgcatgcgtaagttacgattatacccctattgtttatttgttttcgttcctctccaatgtaatttgaatttgaaatcacgcctctattaaatatgtcatcgtataatgtccatattgaacatttaactaaactaaaacaatgttcatggagtgattcttaagccaacattttttcttgttcaagacatagcattttgtaagtttgatggtttaaagtaatgtacttattgtccaaaacgagttagctaggtaacatggagttaatcggaaaaacagaacatatttccaaaaaaaacatacttaacacataatctacttattatcacaagtaggttactagtgccaaaccaaagaagaaaacccctaaattccttttaatgctagaaacgaaagctggtattaagatttaactgatgatttaaaacgtatcaccaataattaacacataatcgctcgattagcaacaaagtcgttgtagtatagtggtaagtattcccgcctgtcacgcgggtgacccgggttcgatccccggcaacggcgattactttagttttgcctaattcatcgaaccctctgattcattccaaatgtttcccaactcgcgttgatggttcgggttcctctgcttttaagacattagttacatgctcctgcactttctacaaaataaacgtcataatccaaaaatattacatgatcatacatcatatatgccgccgaaccttgttatgggacaaactcgtaaacccctttttccttttatgttcaatgaactatacaagttttggttatgaatacataaataatgatggacccagcaattaaccaaaatttggatattagata

SEQ ID NO: 29219 - DNA, 590 bp, Arabidopsis thaliana columbia
cgaggtctataatagtcctgagcccactagattagacaaactgaggtaagctccaatcctttacacgtttggttttgagttttgaattgtttgacaactcaatatttttctttaactgctattattggacgactattatagttgaatcatttatttttcttttattatatcagttcttgacatgttatttgttgagcaccacatatttcatttatctctatatgcattagtttttttgttttgatatttttgttaaataatataatacatacatacttctgaaagtgaattatttgaatttggtttatgcatatcgcatgtatggaccgtcatatgttatatcccatatttcatctttactcaaatatggaccgtcatgtgtgtgtcaagtatttattgctaatgatctaaacgtattctgaaacaaaaaaaaaagtcggaatctttctttttcaattcctctttattgcaaagatgcataccatactatgtgaaatttcctcataggtcaaacgtaaaaatacatgtatgatgcatcataaccgttatttatcgaaattaaatcataagaataaatttatttggaaatt

SEQ ID NO: 29220 - DNA, 435 bp, Arabidopsis thaliana columbia
tgttataatgttttaaaatgtatatatatatatatatacaaaaactagattttaatgtgcgttaagcgtatagcgggtataatttagtttttaaaggtaacatatattaaaacttgtaaattttatttttataaaatatttatatttcactgtttataattgtcattaaataacgctataacaggaatttatgagataattgttagaaaagtgaagttttaaaccttattaaagcgacgtattaataatatgttaaaattttataaatgatgattcaagtagatcaaggatattaggctataaggtaatgagtgagcacgtgtaatttgtttaaaggtttcgtgattttcttgtaggtgtaattgtagaaatttgagagttatcgattatataattactcattgtacattgtatgattctctaatacatttggat

SEQ ID NO: 29221 - DNA, 591 bp, Arabidopsis thaliana columbia
aatcatcttggctgcatagtctatccttgactttctcacagaaaacgaatgcttgtttgtacatacctaacacaaagtaaacatcttagaaaacagaagcagatcttcgcaccttaaagatcaccatgcaaccaaaattggaaaataaattctctctcaaagagaaagaattaaggtgtccaatgtttgggactcttaaaaaatagaaaaggtaccaagcaaataaaaaaatgtttgacacaggagttagcttacttttcaaattgtctttctcagaatgtgaagcagaaccagaatatgcttcaagagcttcagctcttcatggacgactttcttttctctggaaaatggtgtaggttatcttgacctgcttctctatcgtccaaatcacggcctctccttgccctgttctccttatcaaggcgcttccgctgctctctttgaatcttcaccatcgttttatcatcattaaggtcataacgttcaacactataatcaccgcggagagcaacagccctttctcgtcggcgttcctggtgataacaagttgtagcgggaacaaaattgagatacgtggcaaaaaataggaca

SEQ ID NO: 29222 - DNA, 729 bp, Arabidopsis thaliana columbia
  unsure (1)..(729): unsure at all n locations
acacagttctgtgcatgctctttcgacggaagtcgcaatgaagcagttctatgaaactttgactacgaaacaaggggaagagaagagtggagaagaagggcccgactcttgttctgtttcaggttcttgttcaggtgttaatgtcacagccgacttaggaagctatgttactgagctaagttctcttcttgacaaatctccaacgattgaagtgaaatttgatacatagacgaggcttgttcagtagacgttattcacaagcaaaagcaagattagcgtccagtttccaaaaactgtttgtaagctcggttctgcctcagcgagtagcgacggctaaatcatgctttctgcctcggcaatttcattcaaccttctctaccaattgtagccgtactcgccaagctaagaaaatttactctgttaatttgggttgacaaaccaacaaagtactctgtcagcaaaattatggctagttatttcttaatgttataaaatggactaaccaataaagatttttaattaaaataaattgtgacaaagacattccatatatgcaaaacttatctcgatgcaatgcatagatattcctgagtacccaaattaacattgttagcgatggacgtacccttagtattgtagagtgtagactaatcggtgctcattaaacgaaactcaaaaaagttgtagaggctatggcaagtagtntcgtagccacatacgtgtacagac

SEQ ID NO: 29223 - DNA, 442 bp, Arabidopsis thaliana columbia
ggatcaactgcaaaaaaacgaaagaaaccttttataatctacctatattctctggaagtatccaataacataacttgaacaaaccttttaatgacgctccattcaagacgagtaagtcttggaatgtgaccaagccccacgtgatttaggtaatcgacaaactccatctttgaaaaccagggatggtcgatagcactataaaaccattcaaatatgcaccttcgacgtgcaaagggaaacgacagagaagtagcaagcttatcctgaaattggaataaacaaatatatagatgtacaagatactgatgtgcgtaggagaagtgaagttagaggctccacctttaacaacaactcttgttctgaaagagatctggaactacgtgcagctttatgagtggtttcagaagatttagccttttcttgtaagcttttctgcagactc

SEQ ID NO: 29224 - DNA, 589 bp, Arabidopsis thaliana columbia
ttaatagaattttttttaaagatatcgtcacacttggaaaaccgcagattttccgcttgtacttttcttataaagctttctaactcttttattatttgtttcagaagcatcggttacatttacgcctatcttgaaaatttaaatctcatttagtgttcgagttcttacgttttggtccgtctaaattcgttcagtcaacaattttttttaaaaatattttcttatgttggactcatatgtgatattttacatcaatgattaaaaaacttaatgatattattagagaactatttcttgcttatgtgccattgctttgataaattgatttccgttcacattcatgttgtttaacttataacttaattttgtacacaaaccaattaacactactttttgtttatttgtttaccatatgcatcactacatattataatttatgaataacaaataaaaaacggtttaagtcgtaaatagtgatgattaaactattttgaaactaaacatttttttttgttttgacatgaaaatcaataaataaggaagaaaggggcgtaatcgcatctataaagaagagagaagatgggagaaa

SEQ ID NO: 29225 - DNA, 857 bp, Arabidopsis thaliana columbia
ttctaaacaaatgatatatcatggtggttgattctagtttacgttttccttgttatatagtattactgttaatgtttttgaattcctttgttttgaagctttatatcttgtatttgtccgaaactaaaaagggaatggtttgtgcaaactataacattggggctttctttatatgttacatatctttggcggattccacacttcacttctatatctgcctggttgtaataaacgagttagtttggcttttgctcgtgttgctgtgttatgtgaatatataccttaattagaaatgcctaaggtctgtcttttttttttgccgtctaaacatttttattagaaacatagaataaaatagtactacaaaaacagagcattacagctcaagaagaaaaacagagcataggtgctcatacacttatagaaaattatttacaaaatttgtttcccaatctatatttcagaaaaaaaacgtactcataggaaacggtgaattagctatcatgtatttaaaaaaaaaaaaaatagatgacaagatcgccgaccagaacaaaaataagatcataagatcaaagaacaagagagctgtcacatatattttactctctgctaaacgacaatcaacaagaagcagtacactgaaaatggaattatcggaaatgacgatttttttgtagatcgaggacagaggagccaaaaaaaaaaatgtaaatgtttcaggtatgggcttagaaactaagcgtaaagagaaggaagagaaacaaacttggcctttgtaaaaaactcaaagtcaattcaatcgtaacacttggccactcatcgggaaataatcaaaggtcaaattctggacacatgtt

SEQ ID NO: 29226 - DNA, 589 bp, Arabidopsis thaliana columbia
atgcaaagcgaagaaccttagttagatttataattggtcaagtatggtttgtcacccctctttagcttcagttcgactatcagaagattttatgtttatgctaaattcttttctttttttaaatatgagtttattattttcagctcaaccatacataagtcaaccttaccaataaaccagtatcttaatctcaaaacacaaattgtcaaacatataaactcccattggtcactttatattactgcaatacgagatttaccgtttaactaccaatttcaaaaacgttataattttccttctttcatttttcgtattgttactttttactgtttttaattattttgatattgattacaacttatctatctttcaaaaacgttgtatcgttttctattattaaagacataggatccgaattgagattaaaattacaagagtcgttgagggactaattaaacatgttaataaagataagatgtggatcccggttccggggacgggagagggaaggtcatgtgctattagggtaggaacaccgagaggatgtgtcacgtgtcacgtgtgttggacttaggtgtcagaatggttt

SEQ ID NO: 29227 - DNA, 495 bp, Arabidopsis thaliana columbia
tgcacctgtttataacaaaatttgaatattgtagtcatatttttttggggagataaagaaatttcatagtaactgggaacaagagtactgtcatcataaagccagatgaacaatcaattttctagcaaatgatggtgaatgagtatagatagacagacctgcatgtagtgacgattcagttgctcaagccaatcgattttcacaaacaccttatcagtagcaaatacatggctgttccttttaagtatagttgctattgtgtatcccaatgccatgagcccaccaagtaggcgaacactgacttcaaatgtaatccttggggatatgacaaaaggagtatccgtaacccattcctggttgtcaaaaccagaaccacagttattcaccagatactaagcatcttaccagaatcagagggattgtcagcttttccagatattgaatagtcatattgatgagaacatggaaaataaactctgaacaaacctcaaacat

SEQ ID NO: 29228 - DNA, 587 bp, Arabidopsis thaliana columbia
tgtgtaacttcgttccattaatgtatttttttttttttgactcgttactacattaacataacaatttgtagtcatgtgtgcatgtatgttattaattttttgtccaagttcatgtatgcatgtaattagtgttgtacatatgtagacgaagataattaaggctctaaatggatatagctttcaaattaatgctcaaggtcaggctctaaatgcaagtgatgcaacattcacgattggttttctctgcagtgaaagagagaatggcattacaataaacagtcaagttttatttctgtattatttaagtttttccattgctaaatttagatgaaaatggcactatagtaaatataaaattttaacaagggttaattgtcttcattatacatgtgtgaacgttattcaagttttctcactttaggaggtgtttagtttcgtagttagattaaataattatctttaatcttttatctcagtatttcattaggagatattgccacatgagtcctcttccacctaataaactacccctcttctatttgatagataacactttcctgaatccttatgcaaagagattcatgaaa

SEQ ID NO: 29229 - DNA, 650 bp, Arabidopsis thaliana columbia
ttttttttttttcgtcgtcactcttttttttgtaggaaattgcaaatattagattacctatggataccgagacaaatcaatcaaactggagttctaagaaatacaagagatgacatcatgtaattggttagatggtgtaagtaggagaagtataaaagcatcatgcgctaacctagcttcagttcggtgccaggtttggggactgatacatccagaccagctcttgtggcacgagaagtttcagatcggtcggctggaggataaataggcggctgctcgggtaaggacctaccgagcgagaaaatttggagttgatgaagaagcacgaaaacctataaggaggaaagggttgataatcaaatgtccgtattcatatacataaacgacaagcgctgatagaaatataaagagaaaacgattaacatacctttaccacctcgcacattctttcaccagctgtgaatgatgattcgctaacagagttatctataaaagatcttcaggtgttaatggtttgcataaatagggtttcaacaaggaatgtccatatcattcacatttgtcatcagctaattgcgtagaatgtgtaataaatatcctaccattagaagaggatctatccagctgaagaagaacagatttaggctctt

SEQ ID NO: 29230 - DNA, 515 bp, Arabidopsis thaliana columbia
taaaataaaaacaaaattcatacaaatatatattttcaagaagtgggggctcacatgtcagcttcatgggattcaatcggacggctagaaaaagattacttagaaggcttagtgggacccacgtgtacagagaggggggactcgtgcccacacgtcctttggtccatccatctttccaaatcggacggtgctgattagttccggtttaaagctattgatagttagataccatcactatataggtttaattagtattttaaaatcaagtggcaatctaatctttaatcacgtaattaaaattgaatttttaaggcaataaaggagtttagctgtccatttttagtggtgtccgaataaaaaccctgtcgtctggagggaagacataaccgaccgttgcttcttttcactttccaaataaaccgttcaattttttaattaattgcatatagtagaagagttgaattttcgcaagagtccatgtgagagaatgaatactctgagattcgctgcggtgt

SEQ ID NO: 29231 - DNA, 611 bp, Arabidopsis thaliana columbia
tgaatgaaacattgtgactttaatctcggtttgatttcgatttcagctttggttttgatatgattcaacttttacctagagaacttgcttgagaagttcttatgaccgaagaagtcaataaggtccaaccacaaatcaacgttgtccgggtcgtacacgcggaattctgaaaactacacttccttttgtgttcgttagactcaaattaattttcaaccaaatcataaaaataaatataaaattggtagagaatgagtcattctgaatgactactttaacctctttgtggtcgttattgcaatactatttttatttaaaaaatacaaaaactttcccttgtggccttgtgggtcatatataataatacttgcaaattccttggcaatttctatttaaaccgatttcagtagacttgctattgtcatcatttcatatcttagatcatctctcttctctctctttctcttaagaatattggaaatttctgaagcttttctatagttgatctcgagccatgcctccaatggtacgccttctttttcctatgatatctcttaaaataattatggcgttgaataatcgtttgtatataaatactatttgcctatata

SEQ ID NO: 29232 - DNA, 570 bp, Arabidopsis thaliana columbia
taaagttaatagaattatatgttgttttcggtttctaaagattttattttcttaatttgttttgttttctaattttaattttgatttatttttaaatatagtatgatatgacgtattattgtatttttattggttattaaagaggggtgaatgaagtttgttcacccctaagggtgaacctaagaattgttctatattaatagagaaacattttgaaaataaattttattcttacgtgttattaacaagaatgtcatgatgacatgtcgcgctccgaaagctccataacccaattaattgtttgtccttttttactagaatatttacatcaatttgccatcactacaagaatattggcttttggtagcatacgaataacgctatctaactatttcatagcgttttgttaagtgctatttctgtgcccgtcatcgtaggtctgacactttaggtagcgtttatattgtctgctattatattataatatacaatagcggttttctctgtgcaattaaatattatttaatagcgtaatcatattgttataatgagattattaacacgttttta

SEQ ID NO: 29233 - DNA, 588 bp, Arabidopsis thaliana columbia
  unsure (1)..(588): unsure at all n locations
tgaaccccaaaaacattttaaaaataaactttacccttacgtgttataaacaaaaaatgtcatgctgacgtgttgcgctgaaaaagtttcatagcccaattaattatttgtccttcacttattagaatatttacatcaatttgccattagtataaataccacatattttcattcaactaattaaaaaaattacaatttattatccaattaacaaaatcgaacacctaacatgagtaattttaataattattaacacaagaccatttaaaaaatatacaaatttgaactgacagaaaactaacgggatatccgtcagttatgacattataagaaataaaattttattcttcttcttcactttgctttctctcccaaaaatgaaaaatacgcagatttgccgccgatatcatcttcccgtcgtaatagccggaaaactcacctcatatctcagatacgcatctaacttaggccatttcatctccaatctccctttatgatgtaaattatcacttccacttttaattttctaagtttttgatagatnggtgattggaatctaaatctgttagaattgaataggatatggat

SEQ ID NO: 29234 - DNA, 561 bp, Arabidopsis thaliana columbia
  unsure (1)..(561): unsure at all n locations
ttaccgtacacgaagctatgcggttcagaatgcgtcccacgtgttgcgagcggtgaacacattaactccattacgcatatattaactctaatatctgctatctcattatctcgacatttcatattgtttattctgtataatctctcgacattttattgctcgtgttgaagttttaacccctaacgaatttattatcggatactttttaccgtatacgaatttttgcggtactctcactacacgtgtaataactcgacattttattgcgagtggtgaagccctacaactatattaactttattatctgctatctggttatcgtctttgtgggttctgaaatccacactagagatttgtatttaagattatgagaaaggagggttagatcttcactgaaaccttgagagttatattgctaagaacgaatggactttaattatgacagagcttttacaatatgaaatgagattacaagtgtacagtgtgtgtgtgccaatgtgaactatattgagtgtgtccccaagtcgtccttgctccttatatagatnacgcacgtggtag

SEQ ID NO: 29235 - DNA, 1041 bp, Arabidopsis thaliana columbia
attccagtattgaattttatatccatttgatcagcttgtttggtatcatatgattttggctcgataaattgataatatcgttgaacttctaagttaagagtattttactttgcatacgagaatcaattatttccacatggtcacgtctaagtggacatgttattatcaaagcttccaacacgatttcattatgtagaaactaataatcatataggtctccaaaacacaagaacaatctgtagacattactttcaaacatcaacacgctaaatccaagtagataatgatagtttgtgtccatgataactcatccacttaaacttgaccatatggagtaatggtgaaacatgacaaacacttgaacacaaatgattcatgtttagagctttcatcaattataatttgaatgaataagagtatcattggtgatgcaagaatcacaacttggtcaaaacaaatcataccaacacacaaaagttcatacatcaatgaatatcccaatttcacgagtagcgtccattttttgttgaccactagttcacttgtttatagacactctcatcgttatgtgggttgatcacttgtttatagacacatatgctgcaaacaaaatacgtggttgtccattacggattgtccaaatgttgtagtccaatagagaacatcaagtactgaatttcaaacaaacggggcagagaagttatctaacattatcatagaattatgaacaagatcaccaaacacttggaagcttttagtaaaccaaaccattaatctttagttttataggagaaataaccacacaaaaatcaagggatgcacttcactcctccatatcaaacctaaagagataaatgtgtctcaatcaaatactatatatgtgtaaattgacgctaatactctccactagcaaaatcaaagtctgaataaatcgttcaaatcaatctaatttcatcataagagttaaggttagtttatacctcaatccagacaatttcaatccacaatcaacaaatcccaacgcacaacaattttcaaatt

SEQ ID NO: 29236 - DNA, 649 bp, Arabidopsis thaliana columbia
acacatacaagtacagactcccatctaccaagtgatatatagtatgatagctcagaagatgatcccaatcccatagatgtcctaactcaatccttcttcccattctttctgtttttggttcaagttctaaggggtgcttctttaaaacgattcaagagtctagcgggtttgattttaaactttgacaaacttaaggcttttttctaattttagcatagaggacgttttacacttttctttgaattccaaaccctttactagactaacactttcttttctatcccccttaagaactctaaactcttactctctttttttcttttcttatcattctcattctctttcccactcattccatacacaatcccaatcccaaatacaagtctccacctagtcctagctaacccaaaaagcgtgggctaggtctacatgaaagactgctcttgtcggctcatacctaacacgttataccaagctcaatcggaaaagacctcacaatcacacaaaaatgttctttggcttgaaataaggttagggtcaggtatgggaaactgctctaagaatgagagtcagctacttggattaacaaagggtggtgaagtgaataatataatccaagtatgtatatggtagccatgagttcacaaac

SEQ ID NO: 29237 - DNA, 576 bp, Arabidopsis thaliana columbia
  unsure (1)..(576): unsure at all n locations
tgcatttagcttagtttcatgccccttttcatgcattcttagtctcttttccttcttttgcacattttgcattgcattgcatagcatacttgcatttggagtgttttgcaggtgaattaggtacttttggactcaacttggaggtttctagcacaagggatggacagactcgagttcgggggacctaaggaaggatttgaagtatactcggcctatgtactcggctggaggccgagtggagcacacgtgaagaacaaggatcctactcgaccaggcactcggctggaggccgagttgtgcacttaaggatgaagagaagccactcgaccaagccactcggcctagggcaagctgtgtgaccaagaccaagccactcggcttttctactcggcctagggcgagcngctcctgccgcgacttatcttttttgtcttattcccaattagggcaacctaggattgcctataaatagacctcttatgtttttgccaaaggatcttcgctttgtccgctggatattagggtccttgattttcttttgcattttctggttgttgtgttgagaatttggatttg

SEQ ID NO: 29238 - DNA, 621 bp, Arabidopsis thaliana columbia
  unsure (1)..(621): unsure at all n locations
tcatctctatataagtgaatatttatattgtatctttattctcatgaaagtctattataattctttctaaatactcttgtgttctttactctcatcagtttatcaaaaatagcagatcatatcaaacaaaacaaccaatatgacttaaatggttattagaaattttaaatcacaatcaacgagaaagatcaaaaaaaaattcgaaaactgcaagcttactcaagaaacactagagtcgaagcagaatctcaatctcgatggttgtgtttacaaaaaattaagagtctattgttatactttaggtatcaatcatagagaatttgttttgaatgatgatgtgaagtaacaatattggttgtttaaaaatctttagggttatagattttataaattgtatatgtcggtttggatttataaaatagtggttagggtttagattttacaattaaataaaaatagatgtcggtttgagtttataaaagaaatagttaggatttagattttacagtaatcgatttaatccttttagtgaattacttttactntattagataatatggatgtttaattatttattagatatatgtaatttgacggggtagtagagagggatagagagat

SEQ ID NO: 29239 - DNA, 791 bp, Arabidopsis thaliana columbia
cgctttaaaatatctttaaaatgtcatataagattggtgtttcaatgctgcttctctctttgacacagagaccagcatcggtagcctgatgatatcaacgtgtgctgtatcaggcaagtcctgtagaatctggcttctgctccaaaaacgaagattgcctgtagcaagaaccaccacaacatatgttaggaacagactctgttttgtagacaaacaaaccactttgaataaaattaggaatggagttgatattcttcatcattcatgttctctcttatcttttgatatataaattttgtaagcaaaaagaagttgattcttgtaaacgttatatcaaaaaaaaaaaacgaaatttccttattggttagattgagattagtaaatggaaatcggatctaatttagattgcctctataaaactgaaaatcctcaacggttagattaataaaagtatatatcaaatcatcatttaatgaagcaaaaatactctgctctaagagaaaaaaaaggaaataaaccaagaaacgaaaaatatatcacgctcttcttcttcttcttcttcattcttgagaaatcaccttcatcttctttcttcttcgagaaacgaaaaataaacaaaaacatctctttctctttttaatacctgatcgcgggatgaatgatgattcgtgattggttgaattacttctcccacatcctctatgtcagcccaatcgatgatgatttcagacacaagcggagaaggaagagattgggggcagtgaaagcgaagagcacctaggaaggttttg

SEQ ID NO: 29240 - DNA, 601 bp, Arabidopsis thaliana columbia
gggaagctttgtcctgttcctatccgctacaaaaacattccattcaaacatcaatcaagcctttttcaggtattggcataagctaaaaaccaaaacaaaaaaaactcgagtggtaaaccataaaataaagcactttcactagttgcattagagtcaatcgaattgcaacgaagaatgcctgattatggacacggaaaaagtacctggaaccaagcggcaagagagggtacgaacatcaaagctgcaaggagatgcaatattagtaaaccgtgcctgtggttgaagatgtctgcttgcgtctcaacaaatgacttttcagacaagtctcctgacacgggatcctctctgcttgagggatgtcgcgttttacctcggcttcatttttctggtcaagtgattcctttctctttgatgccatcataatacttccatgaaacaaaaacatgaaaactaccatcagctttgattgcctcctactgatttctgattgatgatttcctatttatgtgagtttgaatttttctggatcaaatattggtttataaggggtaaaaccattatgtttgatgtagttttgaggcatcttcctactcacatgaca

SEQ ID NO: 29241 - DNA, 560 bp, Arabidopsis thaliana columbia
tcgactctagattctgagaatcaagtatacaaatcattgccatctcaacgttaacattagatcaaaccggagcttgatatggagctcgcttatctggaactccgtcttctgctcttttatcttcgaaccacttcaaaactcgcttccttggaagattggtcacttgaacaatgctgctaaccacagcattctattcacagcatcatcaaacatgatcatatgtgagatagagcattcaagtaacatagaaattgattcaaatgtaaaaggagaatccttacagtgggtcgttttgatcttctgtaaactttctctagcgtttcaatgtgagctttcttcactcttttctgagcagaccatctctgttgcatcacatgaactgcttcatcttttactttttccttaggttcgaccacaacatcttcagctgataatgattccacaggacttggatcaggtgaggagttctcaggtgctgctactggcggtttttcatctggtagtgtagcacttagcattagcagctttggaggcgggtccgaagcaattcaagacataag

SEQ ID NO: 29242 - DNA, 1239 bp, Arabidopsis thaliana columbia
cttaaaatgcccttctcccttagacttaaaccatgatggactgaaaatatcatttttgttgctttcatcatagtgtctaccacatgcctagagagaaagtgatcaactctgtttagggacaactcaatcaacagtgtggataattcgaaactaaactctctacaacttacgagtccagtatgacctagttgaccacatttgtagcaagatacaacccatgacattgaatcatcgggttcgacacatcatagatggccaaagcttttacagatatagcattgtatattctagtcaaagtaaataacagaagttataagaaagaaatcataagcaaaatactgtaatttaggaaaacaaaagttaccttcaaatcttccttagactactcatacttgcacaaaatcatgtcatgaccaatgtctccacatcttaaacatacaactcttttagacccactgttgtacttaatagcaatcatgtctgatataagaatgagagctgacattgcagctgatggactcactgacagaccacctgatagacttgctgatgaaccggctgaagaactttctcacggacttcttgaaggactttctaaagaacccgctgacgaactagctgacagcccattcctactcgacgaaccacccgactattttgaagatttcctgctgtttatattcactctcatgaagactacaagctgtttaggagttgccaaaacgacacacaagctgtttttatgtgtggaaccaacaaaagagaaagttgccttttccgacaaagctacttccttttcagcaccaatcgagattcttctatttaatctggatcctccatctattcaaggatatcttaggcgtccattaagccttaaagatctgcatatctcttcagccagaatcattgacgctcccctattaaagccaaacggatagaaactctacaacgttctcctcctttatgttgaatgatttgtttcctttctcactttgttttagaccgttagtggtcatctatttcgagcctatataagctccatcactttgtactttcaattcacgcttttgataataagatattcagtttgttttgcttcaatacttcgtcttgaatcaaatcattgttcttgcgagttctaggtagtttgtggaatcaaaccacttaggtttcgtgtagtctctgatcctcgcgaggaatagcccttggatcatattctctagccctcggtgttgtgga

SEQ ID NO: 29243 - DNA, 652 bp, Arabidopsis thaliana columbia
ccctgaggaagtctatacacacaatattttcctatcctttctttttttctgtcgggaatttcttcatatcctagcatctagattatgattgtacacatacaaaaacagaaaagaactagacttcaaaataatgcaaattagaaacaaaaaattgctccaaaaaaaatatattcaaaactataaataaaatattattatgatttttcttctattttacgtacattgtatatctctagagaagaaaataatttttaaaaaatagtttgggatcaacgtcgcacttattgttttgtcttacaatctcagagtctcaccgtatccaccacgctggtcaacaacttcaacaaaactctcttcctcgaacttcaatcttatcccttcatttcattaccattaattcacaccaacggctaacattgtcctcctcgctaaactgttaattatacgtttggccgtaatgttttgaagtctgcctatatttcttttcaataaatgctcttttaattaggttttaatttggtgaaatccacctttaaattttctgatgctgttaaatctaagagtttgaattttctaaaatcattgttgtcggttatcatttgtacatcttgatagaactataatatgatcaatataaacttataataataat

SEQ ID NO: 29244 - DNA, 597 bp, Arabidopsis thaliana columbia
ttcattcttgaccagagggattattctctgactttccttgtccaaactccggtttcttcttcttcttcttcaggcgtctcacactgatcagggttccatgaattttgttcttctcttggtagttaaaaaggcagggaaggagatttagagtaatttaaacaatatgtgattgttgtatatgcctttgtatttgtttgtatactcataaatgtttttctgttttgtactcggcattcttgtaaattaaagacattatccacattcttctatagacaaagaaagttatgtggtaccacttaacctaagtctcgttctgtaacaaccgactagtactagttcaagtttaacgagattttggtttgtagtaacttcaagaggttgatccaacaatgaggcaatgcaaaacatctgaactttattatttaaatgtcagattataaaggggagtccatttatgtgagtttaggcgctttatcgctgtttacttaaacttagcttctactatgtcaattttgaacacttatcaaaagtgattgagatggcaaacagtagttttcagatgacatatggacccaaagttttacatttatattggag

SEQ ID NO: 29245 - DNA, 582 bp, Arabidopsis thaliana columbia
caatatataattatatatgacaaaataacgcatcgtaatagttcgtttatcttttcttttttatattattgctaatataaaaaatattaacatgttatttaaaataaatatatgaaatacatttcgaagatatatatttcttcttaataacttatacattttacagctgcaatagatatttcgttcgaaaactaaattattgttatttttacataaactaaaataattaattcgaaaaaaacattaaaataattaacgtggaaataaatagtgaatagcgaagaaagaggaaattatcgccaacgtgcttcaaattcattgtatttgtcgatgctattattaaatatttcttgatgtacgacagaaaaaaaaaaaacttgatgtaaggaaattatttcctatataaaccatgacatagatgcccatccgaattcggacatgcgacaaaacaaaacaacgattcttttaaaataagaacctctctgtttctctctctctctatatatacgccctccccgctgatcgatggcggcttctgttgacctttggtggtcgaagagtgacggagatgtgttggcatgt

SEQ ID NO: 29246 - DNA, 620 bp, Arabidopsis thaliana columbia
cgagataatccaaaagtattacaaaaaggccggtgcagtggtacacagtaacataagagattttaatattttcaaataagttaataaccctaattctaagatcaatagttagataacacaaagtatggcaaataacctaaagcgaagagtgggaatagagatgatgacacatagaccacacgtgtggactaccagtatcactatgacgttgagtagcattaaataacccaaaacggtcgaagtttcacctacttcttttttttgtccgtctctttcgctcaggtcttttttttcccctttactcgctgtttatctaattatcaatctgtgatacatatatctccactttttgtaactgcattccctcatgggttaagcttttatcgcaaatattgtaatatttttctgctttgtacaacatttttaacaaatagataagtatgtcccaaatagttggtttattccaactgtttccctaagtgtttgtaaattgtaaatctgattaacgtgaggaacactaaccattccaattcaaccggccagcaaatcccaaaaatttgttccgccatatataataatttgatagtttcagcacaatggatggcagcaaaatatttgtt

SEQ ID NO: 29247 - DNA, 532 bp, Arabidopsis thaliana columbia
  unsure (1)..(532): unsure at all n locations
ctaacatgtacttaaaatatatatatttaaaacctatagcacatcctccaagctcgatccaaggacttatcaagatggattttgtgagaaatcttcttatataacttggaagacacaatgacccacaaacatgttgccatttaatttgatatacaacaaaaaggtgtgaatgcttttgaaagacatattgggtgttaaaagaaagagcacacgtggggagtcttaaagagggaaaaaagatgttccaagagactcatttctcaatcttattgtttcctcttcttttggttccatttttgtggtcctttttgctcaccacttctttcaatgttattcctagtggatttcttctgacaactaacttttactaacttgtattttataccataatcatcaatttttcataatgtcagttctcttgaagagtcgtatgctactccttgttatcataattaatgttgacattcaagtaaatgtttttttctaatcagtttgaaagattttgagggcattttgagcaanaaatacactt

SEQ ID NO: 29248 - DNA, 579 bp, Arabidopsis thaliana columbia
tgtttgagtgaataagacgactctagccttcttaggttacttacgtacatacataacacattacatgtaagtactgattcatgtatataataaatacttcaaagtgatccatatgaaatataaggttgccttcacatttatgtgtgtacacgatcttgtagttatcgaacaggttcctgattacaacagaatcacagaaaaaacttcagttactgctttaagtacttctacagaagattagccgcaaagttgatttagatgaagaaatgaatgtgctgtgttctttaattgtatcgttaacaatccatcaagcaatcaaaatacttaaaatatgctctaaacttatgttcttatacaaaaatactaaaaatagatcaaacaacatccaaaacaaaaactaaacttgctcaagaaagtggcgaagggatccgatagagccaacgcgggagagcaaaggtagaatattcatataaacgtttaaccgcggagtcccactcgccagcaaaactcagagtgccattgtcgctgctatggtcccaaacttgccattgtgcaagttagcagaggccaaacaggggt

SEQ ID NO: 29249 - DNA, 272 bp, Arabidopsis thaliana columbia
gattgaacagtacaaatcactctgagattgtatgtgtttatatatgtagtctcatacgttcatatgtattaaacaaaggagcctggaaatgatctcgatttcctaatcttaaatataaaagaacaaacaatggtaattgtaatagtgtactttgtgaaagaaatgatggatactgttttgatgttgacgtgacatacactcagatggccattcaggtatatttggatccaaatgatgtttcgaccagtgctcaatcattcataacgttgaat

SEQ ID NO: 29250 - DNA, 485 bp, Arabidopsis thaliana columbia
taacttattttttacattctttagttttgaaattataaaaactaactattatagtaataactggtatgtacacgcatctcttaccctttctaatcttagttcatttggtattaaaatatgtctgggaggttggaactgcccttacattcccatagtgtctgctccctcgtcagagtaccagaagagatgctactagtttcaaatgttgaagtttagtatcgaaggatgtttgattttcgcgtgaagatctgcgagaaaaccagaatctactgcagaaaattcagcattgttcaagcaaaaaaaacgttgtttgaggttagtcgtaggacattatttgttggaacactctttggtggtgtaaatgtttccaacaaatgctttatgtgatgtagatacatagatgcttgtcgatttctaagtggatatgtgctcttgcaagcttttacaaattggatctgaaacaatttgttaagattcaaagtata

SEQ ID NO: 29251 - DNA, 434 bp, Arabidopsis thaliana columbia
attacacaaaattgataagagggtataagtaaataatttaacataacatcatttagttttatgccttgttcaaaaaatcgctaggcgctagtcgggcggtgatggtgggcctagcgcctagcaggaaaatcggagattatacggagattaatcggggattagttttagggttgcttattttttttaaaacatattaatctattatagttaagacatctctataatattgtttttcaagttgtattaaacacatgaaaacaaaattttatgttcaaatttatgatttttgatacaagttacgaacctaagatgaatattttaaattttaatatttttctaacataatgaattacaaactaaaattgggctaggcgccctctaggcgagtctaagcggatcatgtgggtctaggcgaacaaaaatcggatcaatga

SEQ ID NO: 29252 - DNA, 773 bp, Arabidopsis thaliana columbia
agacgtcggcgggggcctctggtctctcagccaggttttggatttagatcggttttgcttctctctttgggccctttgtggtgataactgcctcgtcggagttctcggtgaggttttttttagtcgttcattacggttgtggtagtggttgatggctgggtggttttgcggctccgtttttccgttgtggctctttcgtgacttgctttgattactacttgtgtgttgctggtatttgttgttgtagtttcagcctacggtggtttgcagcgaagatctctttgcgtgttgccctggtggggttctctatggggaatagaggtggtggtttggtctaggtggcttcactatctatgggagatgtttcttgttgattcgcaaaaagattggtggctggaggcagcttatctagctgctcgtagatgctctcatgtcgccgggtaagggtattagttttctatagccgctttgtttttgcgttagtcttcggaaaagttgtaggtgctcctactggaggtttgaggacggctttgagtttgggttgctcatggcaacaaagatgaggattctacgtccttcgagttgaggaaaccacgcaactgtctgaccttttctgtttagaatcggtgtgtcttcatgggtttctgcttttgtttgctagtatttgcttcatgttttctgcttgtgaatcgttattttggtctttttgtagttttcagtttctcattcttcttgtttgcctataatttttgtcaaaaaaattcgaaaaaagt

SEQ ID NO: 29253 - DNA, 583 bp, Arabidopsis thaliana columbia
  unsure (1)..(583): unsure at all n locations
gaggtgggcatgaacttctggtaacatctgttcgtatattccttttgcagcttcgtatatgcctctgtgaacaagcacatcaaggtcctcaaatggaacaggctcgaacagaaggttagcttgccatgaggccagtgaatctgatccctgtagggtattgagttcctttcttaagatatccatcttttgacaaatgtaagaccaatcaaagattacaaagagcaaattacctgaataaagaagaacctggtgccgcttttatcatcatcacatacaaaccactcacaaggcggtgaacggtttgatttgagatcatctgcgacggcctgcttaacttcctctttggctgccacgactgcagtaaccgaatcagcagtagccagtagagaagcttcttcgttgtcttgacgtttagatgatccaaaaggaagcacagacttagaatgggaaaagagacgagaggctgcagaagcagcgattctgtaagcaacagcagggttgattagcttcttcttctcctcatcttcctcgccattgttgtctcttcaccttaagctcatcgcntctcaattgaggatgtacg

SEQ ID NO: 29254 - DNA, 471 bp, Arabidopsis thaliana columbia
tatcaattcatgccaggattggtgattgtggggacgtatagtagacatatggttacttttccagactgtgattatgtacattggtgaaaattttaagctgaggaagcagttgggacttacatccaaatctggaggaacaatcttcatgataccatcgacaaagtcatgagattcgatgtcagagtaaactctttgcgtatcatcaacttcctgtgtttccatgtttctttcggtgctttcctctttcatcggcatagatacatcatggttctcagggagaccaggtgttgatggaagatttgaaggtacatcagggacattagagggttcatcaggaacatttgaaggttcatcagcctgaggaatgtcctcaaagctctcttcgaattgactaacacagcacaatatacatctcagtctcacttccatgttacagatttatccagggcaaggataacgtttgaggacagt

SEQ ID NO: 29255 - DNA, 584 bp, Arabidopsis thaliana columbia
gcatcatgatattagatgttttatcttataacattgcttttatttttaccgatttaacaaaatcgtatattgtatgcaggtagtcaaaattgatacagacttgttttatatcagccaaacatatcaattcagtcaagtgagttaacaatgtatgtcaacaagggggaattgagcaatttaaagagttaaaagaccattaactaaacagacaaagagtttaggagcaaaaagtaataaagtaataataaaaggtcaaaaagtgtaagaaaaaaagaaaagaagaggaaggttctgtgcacgtaacttgaattcgtaaaagtccattgctccttcttccttaagctctttgctaaatcttcacgcaatgactctctccttcaaattcaatcctccttcttctcttctattctcttcccgcttcatcgctctcctacgtcatccggacgctacgtttccccggcgccggcggattctaccggtcagttctctccgatcaaactcttatgctcattgtctcctggaattcaacaatcttttgattagaacttttagattggtgttctgatgggagaatattgttgaat

SEQ ID NO: 29256 - DNA, 693 bp, Arabidopsis thaliana columbia
cgataatcaatttttttaatgttatgacagacttgttttatgttataacagattcttgtaattttacacgatatctgtcgtttgatgacatctttgttttctaaaatataatgttttgtgttatgacagattgttttatgttgtgacagataaatttatattaccataaatctgtcgtttgatagcaggtttaataaaaaataaaataaattgctggaatgaccctaaaaatattttatattacgacagatttgtaatttgaaatccttatggcgaccgatttatagttttctttttccatgattttttaatagaataatactaactattgtaacagtttttttatttggaaaatcatattatgacagatttgatttttttgtcaattgtttttagaaattcttttaaatactactaaaatgagtttttccaaaaaaaatactataatgaattttatttttcaaaaataccacaaatctaaaactaaatttaatattcaaaactaatttctatatcctaaatactaaacctgacacctgataattataccgtaaatatacatagtcaacctatatatattaaaattctataacttcaaaaatcaattatggtttttttttgcatatttgtttgctataataatatttacaatggtgacagttttttttccatgtaatgacagacttattagaa

SEQ ID NO: 29257 - DNA, 728 bp, Arabidopsis thaliana columbia
tatcttggtggcattcgaaagctagaagagtaaagattcacgttgaagtcaaattgaagcaatctatgaagtcgtttggaagatatgacccgaagattgaagacatgtcaagaattggctatttggaaataatgtccaaaacacatccggctgatgagacttgtacccgggcagctccgagtagctcaccaccgaccattaggtcacgcccaagtctgtccctctttgcactgccatcattaggctcctgtcccgaatgccactactcggcccgatcacttacttattcgacagaatgacgttcttacccctaaacctaattcttgggcctcaagtataaatacttgtccttagccctaaccctaggtgcgccttcatcaccagcaaaccctagccgtcaccaagagctgcctccttgccgccgtacctgttgaagcttgaagaacaccatctctctctttctctttctcggtttcgtgtaagactcaaggtggagctttgcctcttgtattctccagttcaaagaagtaatctctaaaccccttttaagttttattcatcttttagttatggtttactcaacccaactttgattagcccctttgccatagcgagtagttctctagttgggtttgagggggttttcaaaggagaattcatggggaccaatagatcaaacatctaggttggtggtttctatggctttgtttgatcgtttacactattcc

SEQ ID NO: 29258 - DNA, 738 bp, Arabidopsis thaliana columbia
ctagagggagagccgcactttttagtatttgaaaacaaattgaagacttcaaatttaaattgaattggactttctttttgaaaaaactcgagagttttagttttcagggcaagtgatttgtttgtgtcaacttacacacatgtaaatacatcaattgtgaggaggaatatttgaaaggatatactgatggctgtgacgtaagtataatttattgcacgtgaaagatttgcttagtgtgtctttgcaactgcttagatgcattgtttttggtaggtcgacctgttgacaccccccgtatagtattcaacgcagccgcgcgtggatgggtgtactgttgaatcttcgtatatcttttggtttattttggtttactcaactgaaattaccttttatgaaaaatgagtcgacaattaatttactttttttttttttttttcattctttcattttaacccaaccatggtaaagttacaacagcataataaaactcatataaaggcccagcaacataaaattacttatttctttcagttaaggaaaataagtatttcgttatttttttaattgcttttttttttagaaacaataactatctatatatacatttttgcagccactttaacaaataaatcttcacttagcacttatttactatggcatgccattgacatttattattttactaaacttatttttaaatataaatataaaatctattatgttactaaaatttatgaa

SEQ ID NO: 29259 - DNA, 968 bp, Arabidopsis thaliana
agaggatcccctcaaatccaaatatcccaaaaggaacaatgtcgtgtctcatcttgcaactcatttgtaaaccttaatctgaatttaaactcatattcaaatcttaaaatcaatgtagacttaatgaaagatacgtagaacaaaggatcataaaaacagaaccaaactaaaacaaaagtcaagactgaaacataattgtaacaagttaaactcaaatgtgaaacagaaaatgaacttaacaaaataaataaaaagtatatagagggatagtcatgggacttcctcccaagtgagcttgtttagagtctctagcttgactcctcacactaatcaagtggagaaaatgtgacagagggaacttgagaagtcctcctcttcactgatatcatcatcatactcagcatcctcccttgacagttgcacagctgagtattcaattcttctttcctcatagtaggctgcttcctcctctggaggatagttgatagtaggtttttactcaattatcctaaaacactatctttccgttgtagacagatgagatatgatcagaagttgctaagtcaagcccagcagaatttgtttggttttctaacagtcctaaagttgatgcagaaaacagtaaaaaatcacagaaatgactgatataccctatcacagggtcgactgccaaaagggaccctgtgatcgagtacaacaggatgacagagtgtgaaaatgcagaaatggaccagtttactctatcacgcagtctcactgttagtagactggtatgatcgagaagaatggttgaaaacagaaaaatactaaaattcaatagcaagtgaatgaagcaggtaagtaaacagagaaatcaaatggatgagaaattcctaaggatggggtaatcgaatagtgtgatctcctaatcaattcagttggttacaaatctcaatgaagctatccttagacaacaggttcacaacaga

SEQ ID NO: 29260 - DNA, 525 bp, Arabidopsis thaliana columbia
tagtaacgtccgccagtgtgctctaaaggccctttatccaaatccttgaagttgttgcatcctatgatgaaacacagcacgagcccagaatttctggcccttgcaaatctgctcatgttcttacactgtttagcccatccgcttgtatgtaattcactcaagaggtggatcaggtgtctaatttcaatgatctcaacacagcacctctgttcctcctatatttattcactcatagtttgcttctctgcgtgtctccactgttatttttcaatctgctcgacggttcattagcactatctctgctgatgtcttggagttgcattctcactctttacaacctccccttttccaagcgaaacattatcgccaggggatatgtccaacactcctcattatggctccaggaacctttccccagtccactgacggtgatgtcaagatagctgtgctgccggacatctaccagcttcaatcttccgtacttggcaggaatcacagatattaaggcgccttattgaaagtgac

SEQ ID NO: 29261 - DNA, 658 bp, Arabidopsis thaliana columbia
acccggggatagaggatccccaggaaacatatccacagattgcccagacagacagctctccatatagtccaatattgttccaatcgaagctatgtgccgaaagttacatgcgcttctctccagcagatacagcaagacgaaacactggtcaaaagttacaaaaccagtcgactttgaaatcaatttccaggaagattccgacgaactgcgtggcgtgtaacctatccacggaatgccccgaaaattagctttcaaaagaagcaaatctcgcctcaatcagaaatttacactgaaggttatgactctttctttgcaacagatgcaaccagcgaaacgcagatcctcactgcacgatcaaccaaattagaaagcaaatttctagcaatccaaaagaattttcatggcgatctgcatatcaatttgaagccccgaggctcagctttctagaaagaccaacctacaccttaacgtcgaattcgacaaagagttatcacagtatttctgtctctgctgcaaggtaatcactatttgataagaacgactcttcatagacgaacaatgcgactctacctttggaacagcaattctgagctcagcctctcgccgatttcttctccatcaagataagtattcgtgctttacatttttggattgttga

SEQ ID NO: 29262 - DNA, 588 bp, Arabidopsis thaliana columbia
ttttttaataaaaaaaattgttttggatgaatatgaaaagaataagaaactagaaataactttttgattaataatagttcaataatatgagtactaattattaatttaaaacacaaatgttgtatggaaaaacaaaaacaacaactaaaatgacaaaaaattgttcaaccatcttataaactttaaacgtagggagcattactttatacttgttgtaaaaacgataatgcttattggtaaaataacccatatacattttgatttgtcaatatgttcatatatgatctagtttttgttctcgttgtcgctagatagacaataaaatttcttagtggacagtgattgtggaatgaatatacgcccaacacaaatataaacatcaaattaaggtgcatgcggtatgggaattgcaagttaaatgaacatagttatgcgtaatttcgagaagggattaattgtattcccttgctcgaaataccacatgggccgtgccccaaaagcccatttaaaatggtttttttttttttttaaatcatctctttagatattttttcaactctttttcacaaaatatatagttcatataga

SEQ ID NO: 29263 - DNA, 558 bp, Arabidopsis thaliana columbia
agggtaccgagctcgaattccgctcgaagcattactgtaatcaaaacgagatacacaaaggccaaaagccaatgcctacgatgacgagtgtaaactgtggtaacataacataagaggtacatatgatatcacgactcacctctatctctttcaataaactgtcccaaggtaagcctaccgttactaagtaaaccatcaagaactgcaccgcactaaacatataaatcaaacaaaagtataagattagcattagagtcttgaagcataaaccaactaatcaaaacactgaacagagagaagaagaagcacgattaaaccttggagtcaagttcttcgtttacaatcctcgaaaacttgttatacctcacacgatgcagaatgttgttaaacaacacaatatactgtacaatagctttgctctcagaaccatctacaaagtaaaaaaaaaaaacatacaaaattactttcattgagttctctatttctgtgtgttgctactaatcaaacaatatagagactaaccaggaggttcaatggagaaagcttgaacacaattgt

SEQ ID NO: 29264 - DNA, 546 bp, Arabidopsis thaliana columbia
gagagtgaaaataaaagtgaagggtggtgtggtcgggtggttaaccagtcgaggagagagatttactttactaattgaattaattaaagagtaatacaagattactaactaataaggacagctttataacacgagattctggattttaaaaaatggaaaattgctactcctggaatagtaactggatctttatatcatttgtatttactactttcgtagtaaaacataaatttttacccttttggattcttcaaccaaattattcagacaaagtgtctcaaatatggaaatattgtttgacaaagttgttgggagctggttgttatacggagttgacttcatcttcatcgtcacttcctccacttccacggctactgcttccactactgctttggccgccgctgccacttccgctgcttacgcttttgctacgaccatcactgtcacttccgctgctacttccactgctactgcttgagcttgaggtttgactcttttgcactctgcgtcacttgtgcctaagtgctctgctgcgttaagaccttt

SEQ ID NO: 29265 - DNA, 609 bp, Arabidopsis thaliana columbia
  unsure (1)..(609): unsure at all n locations
tctattttcccaataatatctaagatatattataaagatactaactctccttttagatggaagattagagaagacttggtatcgtgaaacttgactcgtgaaagtgcttagttagaacatccatcaattgatcttgaatatgtaactagaaaatatccaagatattgaagtttcaagaatccactttttctccatgtcacaaggaattagacgactgaagctgccccacctgttagcaagatgtatatatagtaaacctaataagatattcaccttcgtggtgtgctcaatatatgtatggtggtgactatgtttttttcttcagtttagtgtaatagattattgttttgtcgggaaaagaaactaattagcaattaatatatattgaataaaatgaacaagttagaaatatgttattccatccactatgtaaagtagttctggtttgttagaggtcttgaaaagatgtgatgtcaagtgaaatgcaaaacggtggcatggcgaagataagtggctagaaacgggaatgttaatgaaactanagagagacatatacacgtgcatatatcactcagatnngtgatgtttccaagggtgttgtgtgagaat

SEQ ID NO: 29266 - DNA, 588 bp, Arabidopsis thaliana columbia
  unsure (1)..(588): unsure at all n locations
tttgacttttattattattaaaaaaaatcattttgtgttttgtcgcttacacaacttagcagattgatgtttcggctcacagcccatacgtgttattcatgacaacaaccccctaagaattggtatattttcctactcagttgttctttctgttatacagcagacttttcattatttgtaaaatataatttaaaatattgattaaaactttctagaactagtaaaaagttttgatttcatcttttaaagggtttcattccccttcttgttctctctttatacaatttttgtaatgagcactatattttatttgatataaggaaaacatattttccaaaaccaattatagaatgataaatcaatgtttaaaactcaaatgtgtttctaataggttgtaatattataacgaacataagaaaatgtaaggaaaaacagaacgtaggtaagttttatttagaggctatttattattttagttgtataaggaggataaatggataatgatatttgcatgttcaacggttagggatcggtgtaatgtatacggtcaaatatanaatgagatcagcattatagattgaatatttg

SEQ ID NO: 29267 - DNA, 460 bp, Arabidopsis thaliana columbia
tatcaacggttgctaagttttttcagttcacatcagaatttatctcccttaattcaacatctagtcatgcacctatccctaaaaattatcctcttctatctcctttgatgtttcaccgaaccgctatatatattaatataagcaaaaaggggaaggcccaaaaggttttgtcgaaagcctttaacatatctctttaaattagaatatccaagtaaggactgcaggagctctagaatctctaagatagttagtttgtctttcaattctctaaacctcagccctcaggtattaatactttttaaggtagtgtgctctagagtaaattggtttatattcaaaaaaaaaaaaaggtttatatacacatatgagtaaaactcaaccttaaatagataaatttaattcaattttggattgatttttataataatgttcacaatatattggtgtatcaattatgttt

SEQ ID NO: 29268 - DNA, 459 bp, Arabidopsis thaliana columbia
tgcctatgcagttgtgtgactcttaccgttagttagataggcatggttttcagcacgatggaggagcatctttgggtttaaaggtttttcacaccactgttttgctaaaatattcagtttccattttattcagagtcagataagcaaagacgtaagtgtagttagtcgagatttcttacaagtttgtgttgtatgttcgttttaagagcagctgcagaccaaagttcttgctttaaaatttcatattcagtgaattgtcagaactaatacgcatgagtaaccttgagaaagagacagagtaatgcgaactttagcagtcttttgagaagtggaaaaaaaacatgattctactgttgcttctgtcccattattaatgtagatagagaccattaacttatgataggcaaccaaaatatcaatttcgaatgttttctgatgaaccatcttcagtgttgtact

SEQ ID NO: 29269 - DNA, 783 bp, Arabidopsis thaliana columbia
taaaacataattacttagtcttctatacaagaagtttatattagttttgaattaccaaccttcaaaagcaaactattgaacaattgtctctattcatttattctcctctaatgacactttttgatttcttgtagattgatcctcctttaagaggttaatttttgttaccaaattttgtattgaccaatatgtcttttgcgattttgtgttagacttgtacaaattgacaattttgatacttttggttttttgaacgattttgatattctttgtatattctttagttttttaatgtttagttagaataattagaagatgacacatatatatatatataaaacaacaatatatacatttcgttaagatttttaatgttttatattagtactatataagtaatattgagatccaagtaatatataataatttgttgagaaaattaataaaatgtaaaaagcttaagaaaaattactagcttgtggattctttagaggatgtgaaaagattagaatgaactaggcttctcggccatgaaggtaattcataaagcaacaacagatcacgaggaatcaaattgcaatcaacaatgtccacaatcttcaacttggtcaataccgtcaactcattaccatcaaagttattagagcacacataaagcctaatatattatcatttgagcagcccatctaaacccgctaatgattttgctataaaacctaataacataggctgaataggcttctcaaatgataatattttggggttttatgtgttctctaatat

SEQ ID NO: 29270 - DNA, 1099 bp, Arabidopsis thaliana columbia
gacttagtttctgatataaaaaaaacacttcgaaatgatttgacggtagtttgatcatcacttggaaaccaaattgcatttctactagacctagaaaaataatcaatactaatacttaataactaatactcggtttttaaaggagatggcaattgttataatcggttattaattttttggtcaaagataaacggttatataatgtttgaaacacctgtgtgtgtttttaattaagccaactatgaacttaaagttaaattataataaaaaattgaatttgtaatttatgttgatggagaaattttatcccaattcttgtcatttattcttttaattacattatatctatgtttctcacgcatgcataaaagtcaaaaattatattgcttcatcactctcagaaatttctttccataattctcaaaattattatagattttcacactccatcattcataatttttagatcaataatcaggtgtgttttatttcttgttttcttggtttgagaataaaactttaacaacaaaaagaatacgaaattaaaacatatagaaaaatgaaaaagtctgaacccaagaccaagagctcttgtgtcggcgtaggctgggagcggaaacactcgagaatctatgaacccaaagacttaaaagttgctaagcaagtccgagccgagccacgaagtcacaagctttaaagctttgcaaaagaaacatgcgcactatgaacacctgcgcccccacacgccgccgtttcatcatttacaaagatgcctttttctcctttttatcgaacgttttttgccattgagagcctcctatcggcttgtaggtccatttcctttttcctacatttttattttatatgttttgggtcaaataatagttttcctctgttcctttccatgttttatcacatttttattttttccttttctaagtacctctttttgacgatgttttaacaattttgttattatttcttttatatctcaattgttatgaattattgatttattgttataagtttgtaaacacccttgtgataatctcaaaaaataaccatattatacatctttctatatgattgtgatcgactt

SEQ ID NO: 29271 - DNA, 502 bp, Arabidopsis thaliana columbia
tatatttttcttccttttttacaacgaaaatgacaaagtagaagaaaaacaaagttgatacatttttcttggatagaaaaagagaagctgaccccaaatttcatgtttccacagcctcaggaacatcgtaagagtctgctgttacttcttctgctaaccacaatcctggaaatagagtctgcaataaaggaaaattcagagtcaaaacagagatcaattgtgtgtgagcgagagagatagagagaagaagaagaagttacattcatttgcttctgaaccaatctgggtctcttcttcggtcgtctcggaggtcttttaccaattaaggcagagaaatcttgttcgatttcttctctcaacaaagaaacagagaatttcactttctcattcttattctgctgcgaatctcctccatcttcgctaccacctctcttaacgccaatttcatgtctccgtagagaagaagaagactcgatgatcctggtggaatcatcaccaggtg

SEQ ID NO: 29272 - DNA, 379 bp, Arabidopsis thaliana columbia
taagtataaatggtcgttaggagaatatagattttagatacaattgtagatatatttcagttttctgatattaatttcacctaaaaaaaatcatctatgcttaattgaagttttctagaaaccataggaattcaacattttgaaaattaatttggacataagaaaagtttaaggatatattgaactggagatggccaacatttgagaaattatttgttctattattatagtttgctaaattattaaacaagcacaatacacagatagcatccttgaaaacattacatagtagggctctaagacagtaagtaaccctgatcaagcttaatcaaccttgaatttgacattgtgcagactgaggactactacaaggttgcgg

SEQ ID NO: 29273 - DNA, 1177 bp, Arabidopsis thaliana columbia
cccctttatagatcccttgaccaaaatgattatgcatcttatgggtatgataaggtatagttgtgatccgcggatgcagctacagtcacttaaaagtgacataactaaagatttgaagtggaaatctgcaggttcttgtggacgcagagtgcacacacgatggttcgatcaaacatatccagaaatttgagcaatggggttggaaaactctggaacgccgtgttctggatgctgagagaaccgatacaaacttaaaagctcttcaggtacattccataagtctgttggtgtttcgtgtgtctacccttgttattgcctctctggtgatcattgccagggcctttgtttgcagttgaatctactgagaaatggattcagattgttgaaagaagctggcactctagtgtacagcacctgcaggtgaaaagtccaatcacaataagctctctgtgctcttgcctctccttttttctattcttttagacgtgagtcagtgatctaagtcgtgtaactatcagtttgacgcatgcccaaaacgaagatgtggtggatcagttcctttctgaaaatttctctgcaggtacttaaagtatattttcaacaaattaacaacattcattgtggtaccgttttcgaaaaaaaactcgatactttgtaggtgctataggtcagattttgtgtgattttgtatatttctttttccttacttatggactagtgggaagactaacagaaaactgggttatgacgatgcagagctacaagagattgaaatggccaaggattggccgtgtagaagtggtcgcacgcctaagacactgcggtttgatccttccacctcagcaaccagcggccttttcgttgcaaaaatcaggaaattgccacccaacgaagcaaagaagaatgtgttgtgatacctcgctcaaaagggtcgttcggttgatgactttactgaaaagtgatttagcccttcaaaaagggagatgagaaaaacatatttcacaaaactcactatattgttgcaagaaatataacatgaacaacaagtgagaaagagtagtttggtggtattgatgctctcttttgaatgttttgattgaaaatccttgagaaagaaaaaagaagcagatatgaagatttccaatgcatcagaagctttttatctacattatataat

SEQ ID NO: 29274 - DNA, 515 bp, Arabidopsis thaliana columbia
gaaagaaaaaatcatatatattcccgaaacgagcgtcccattaactaattaaccacactaaatcaataataatactagaaagtagaaactatagcatttggttaaagcttttacgaaagcatgattcatgaccaaacgacacaagtaactaaaatttctccggtttgacatcttttgccattgttaaaatatagtatagcattaaattattttattaaatttacataccattataaaagatgctaataaatatttgataatttgaattttgtttcataaaacaaaaaaaaaaggaaattttgaaggcgcgggggactgagcattatatcgccggcgataatgggatgcatttgcttcaagtcttggcgccgatcatcttcttcaccgtcgattacgtcaacggtcatagatgatctcgaaaacgtcagagagtacgatgccgacgacgacggaggacattatccgttgattttccgtgagttcagtttagaacagctgagaatcgccaccgacgg

SEQ ID NO: 29275 - DNA, 750 bp, Arabidopsis thaliana columbia
tgatggagtcaacggtcaagtaaattcaaaccaagtcaagaaaaatctcaaccgttgatcgagtagaatgaggtggagtgttttgagccgtgcgattgaatgactaaacatggaaaatcaccctcaccgtttgatcgagtgaccaagggagaagcattctccaccgtttgatcaagtatttcgcacttcaagaggatgcccgatcctttactcgagcctgaatgattcggcgaccaaggagtgaggtcaagtggcccacatgttccccttcacttcattactcaatggacaaaccatttacccatgcccctcaccatttccaactcgcctttactatccttccaaagagaatcccaaggccatcctcctccacccattgaaatctccaaaccacttttgaaacatctctctttcatcatctcattttcgcaaactctctcacaaagctccaaagtttcatttcaaactctccttatcacgaattcgttttcacttcaccagtacttcaccaaagttactcgaccactccaaagtctatcctcaagcattcaatcggtttcaagctcaaaattttatcaccaaagaaactgattccccttctcttttgatacctcttggagagttgtttttaattgctttattgaaattcacaccaatctccatggattcaagaaggaatagttcatctcgggcaagaagatctctgttgataatgaagaagttgaggcgtttgacatgagtgagatgact

SEQ ID NO: 29276 - DNA, 767 bp, Arabidopsis thaliana columbia
gtttaataaaattctttacaaaattgtattgcttgaagaagtagctagtgtttgttatttttataacgaggtagcaaatggacaaagcgtgaaatcgacaaatgacaaggttaggatgaagagagaaaatacgatgaagaagacaaattctgtacaacataaaacagcggaattatttgaggtgaaaagttagttggagggttaaagtatgcatctttactgatggagccgatgaatatttttcttgtttcagacagaaagcaaccaagttataggagatgaattggaaactaagcagaaagagttgaaagaacttaagaagcgttaaagacaatgtaggtaaaataagagaaagaggactatttgagtatggtttagtattattatttctggtattgtaaaccggtacggtataaataattcaagtatgcaatccagattcattaatgagaataacgatcttcgtaacaaacttttcttcttcgttctctccttccatggagattctagttctctaacatggtattagagcgatgaatccttaaaattcatccgattctagacctaaatctctattttatttctctttcgatcaatttctacggttgtttccaccgtaaaattgttgtatcaatcaaaatctttctcagtttctttatcctcaacgtattttcgtttttccgatggtggttatcacagaattaatcgtcgcatgatgataagtgtgtattttacatgttttgagcatccatttgtcatcattttag

SEQ ID NO: 29277 - DNA, 480 bp, Arabidopsis thaliana columbia
gatctttgttatcgttaataaaatggaccaactccgttcagcccccaaaatctcgtatattattattattattgcatccccaatacaaataattgacgcccactgtggggccgttgatcgaagctatccttttttgacgagcctatgcatcctgaccctcacaagattcgcggtgatatgatagatacttccagcgatcgagaaactgatactggcatacctcaagcgcccgacgcgctgggcttacctccgctcaacccagcagccatccgtgccgagcatgatccctcgcgccgaatcttgttcacaccagacacaggaggagaaacagatcatgttcaggtcgcacgacctcctgccgcgcctacccccctcgcagtagctccagccgacgaagcgaccgcagctgcagcagcagcagtcaaaaggcgccgctcaaagacgtaccacaacagcagaacgaggcacccatttagacga

SEQ ID NO: 29278 - DNA, 786 bp, Arabidopsis thaliana columbia
ctgtagccaatcacaatatagaaagatctttttgctaatgattgctgatatgttaagtagataatgacaataaagtagttggattcagcaaggatataaataatggttgattatgtttaaattccaaaacaaatttttaaatatttaatcaaaccaatttagcttaatatatactaacattgttgccttactaaaatttaaggaatttgaagtcggagaaaatagcacaatgcattaaggttagatgattcttctattactcttgtcattaaagttatcacgggttgtaatacatttcatgctaggtgttgttaaacaaaaggatacataagcaaactttactaaagtagtcacaggaaatccaacttacaacatatgaaaataaacatagttcataaaacatagcacaattgatttcttatacaaatcaatgagcatattataagggggtgagtaaagaatactcagtgaggagaatcaactctgcccactgaaacatagaacactttctaaagctatacaaccatcatcataacatataaacatagacacaagcaatcaacctaacatgttttaacttctaataacacattcataacaatcatcttatttatattaatataaacatacacatcgttaggtccagtcatcttcgtaggtggaggctggcctcgtggtggaggctggcctcgtggtggaggctggcctcgtggctcaaactcctattcaggctctcagctgttcttgccagatgttacccgtcggtccacactatcacatcctagg

SEQ ID NO: 29279 - DNA, 476 bp, Arabidopsis thaliana columbia
ggtggagaaacgagtccaagagataattggggagtgtccggttagggagcgaaccatggctatgaagaacgcagccgaattagccttgacagaaactggttcgtctcataccgcattaactactttactccagtcgtggagcccaaagtgatctttgaaattaagtcttgcatcaattaataactttgtagtctctcagaatcatgtctttgggggttattcgttttactagttcaaagttatgtctctgagaccgcagatggaaagaacaatttatatcgtttgtcgttgtcctgtgtgcgtttgttcatcattgaactcagcaaaccgaaccatgccgatacatcacactgaaaatttttgcaataaattttggctttcgtgcattacaagaaaggatggatcaagtgtgcatgcgtagtaaggaagagtgaagttttcgactcgtgaatacgcaaggttgatgtatacaaatt

SEQ ID NO: 29280 - DNA, 529 bp, Arabidopsis thaliana columbia
agtttatgaatttaatcaattatatttttagaggacttactacaataagaatatatcaaagcatatttgagatgtctttcaattttgatgtatgaaattgttgatctcatttctagatttcatgagtgggattcaaaatataattttggattatagtttgtatttgcgtttacacatgaaaatcttttgggtttcatattctaacttttttaatataaagtttttgaaatcttgggtaatataccatcctttgataacaataaatttgaattgataatttaaattatcaaatccaaactatagttacttaagaatttataaccacggcaacaaaacatgaatttgtctctagatagtttgaaagtacaataccagtataccatggaattttatccctagactattgagtattagcattgacttggttttttagtttttacaataccagtataccatagtggggagcccaaacaagagcactttaataaaccagagaatgtttttacggttgagataaaactattggacc

SEQ ID NO: 29281 - DNA, 337 bp, Arabidopsis thaliana columbia
ccgtctacgtctcattaattgtttaacctagaatggataaggaacacttaatcaatttgattaattttctggtgaaataaccgattccggtttatgagctttaccaatgcaagaaaattcaaaatcgtaatttatcaatcaaatttctgaatttgcaccaaaccaaccggtagaaaccagatgaaaccggagacgctacctaattaacccaaaatgtatgatatcagcacaacacttcatttctggtaacgaaattgatagacgcggaaatcgggcaaataccagagaagccatcgggtttcctgaaccaaataaaaccggtctccacctagtgtat

SEQ ID NO: 29282 - DNA, 505 bp, Arabidopsis thaliana columbia
  unsure (1)..(505): unsure at all n locations
agtaaacgagtgttctctaaaccaatcctaattgcttcatctgtcactctcccacatcctgattattccataataaaagtaacaaaatttgtaagcttgttcaattcttttgttgctagatatagagactcaaaagtgcattataccttgatcgcgaagacaaagagacacacatgtggcagtaacagcattttggagctggtgatgtccaagcatacgtaggtttacatcactaagctcaacaatctgcatttatatgtacaatttgttgatatattaagaatcacagacccatttcttgaataaaaaataaaaggtttttgaaacttactggttgatcatctttctcattctgtatcacgatgtcacaggactggcaaagctcgatcccatttttgttaatgatgcctttgattgaagaactagatccaatattagatgccanaataaccgatgacgacactgaagctgctttagaacggagaatgccctcgatatgaggaag

SEQ ID NO: 29283 - DNA, 509 bp, Arabidopsis thaliana columbia
gactctagaggaagaactatatgaatactgtaaagaacccgaatgaaaagttacagtttgagtcagtgaggagaggctggaacgagtcgatagacgagtccagtttagcttcaaagccttttaccaccttcaaaacaggctcgacagcgttgactagttgccagatatgagaaaaaaccaagacaacttcgagtaaggcgaaaaggcgaatgcaggagcttcaacaataaccctcactatgcggaaacgcgagcgaaagaggaagacagaaaagttggcgagctctcagaaatggccagagaatgagatgtaacctcgggagacgagcacgcggagagcatggaagcgtcaaggagcagaagagtgttagagaagaaaccacatgtagaattggggagtgtgtaaacaggagcgatttaggggagggtcgaatcttagcgacaaagggctgaatctcagtggatcgtggcagcaaggcactctgccacttacaataccccgtcgcgtat

SEQ ID NO: 29284 - DNA, 482 bp, Arabidopsis thaliana columbia
tgactctcatatactctttttataaaaatttgtttttgatttttgttattccgtaaacgaagtaaattactcagaaaaccctaagaatattgcttaattacaacccaaccagggcaaatggatcctaaaataatccaagtccactgttttcgggtcaaatccaaataaaaccctaattcccctaattctctgcggtaaaatcgattcacatctcttttcctttgtttcttctttatttcttcactgtaaaatccagtaaaatcattctcaattctcgtcaacgacaacaatataactgttcgtcgatcttggtatatctacaggaaactaagaaattggggtaagtgaatttaactgttcgtcgatttgatccgagttgtttcagattgggttttgtgatcgaaattgattgaagagtagtgctaatccaaatgattttgtttgtaggtttggagaaatggctcgaacaaagaacgcatgtg

SEQ ID NO: 29285 - DNA, 742 bp, Arabidopsis thaliana columbia
gctcaaaaagctttaacatatcgataattatgcccaaccaacctaaacggatcgcaaaattacacaagcccattttattcgggtcatatctaataaaacctaaataaaacactttctcactttttctctatggtaaaacagatcgacgacttttttttttccctttcttccttcttcttttagagaaaacctaggtaaaacatatcgtcaatcttcgtcaatgccatttgacaaaaacagatctatattcatttctcttatatttcttcaaagtcgatcttggtaatatttgtcgaaaactaagatattgggtaagttaaaattcgagttatttcattttgggttttgtgattgaaattaattaaagtagagtaactcgaagtgctaatccaaatgattttgtttgtaggtctggagtaatggctcgaacaaagaacgcatgtgtgccagcggcggcggaggtggtttcagacaaaatgaatgatgaagtagtagtactgtcggctggaggttattctgaagcaacaaattcaatttctaacgatgattcaacgttatgaactttaaactttacacaactagcagattatggtagaaatttgttgattttgtaacttacaaaattctgaaactaaagaagtataactacgtatgaattaggtatatctttgttgatattgtaacttagaaaattctgaaactaagaagtatactatgtattaactaggtatgctatactgat

SEQ ID NO: 29286 - DNA, 514 bp, Arabidopsis thaliana columbia
ccaaatctcttgcctgagtttggaaatcttaaccatttaattttgttttcttatgttgatccttaagatgcccgttcactgtcaaaatctctcctgtttaaacttagatacattcagagacatgaatgagcatcttaaataaggtcactagctccaatggatacaggaactaatgtgttaatacatgttatatgtaggaaacttagctatataagtgatatgattttaagcccttcaactgacatttatcttcaatagcttggtcatccaggttggatggtattcttcactaggatatgtggttcaaaattctagcaaaacatggttagttcgattttttagcaagtttaaatgcaaaaaagatcatatgatattaaccaaattgatttagattgaaccatttggatttgttcaatctaatgaaactgcaaaaggagctttactttattccatgataaagcgtacatggaaagagatactaataagtttgacacatgattaacccaacggtcga

SEQ ID NO: 29287 - DNA, 513 bp, Arabidopsis thaliana columbia
ctaaataaacatagattaataaccatttatgtacatatatatatagcctatatatatctaaaatccaagttattaatttgaaggtatgtagtttcatgagctttgaagctcacaatatgacctgggataaagcaacaatagtttgtttcacagccattagaaagatttgctccatggtaccataatcacattcagcagtctcaaagctgcgtcgtttaaccaaaatctaagagaccttgaacttgttcttatgatcaaaatacaaaaaagttagagaaagttacttgtacactaataataattccataaaacattaaacagctcttaggaatatctggttcaccctcttcattgtttctttcttcatggtaagaaagaatgactagcctaatctacacatacctcttcggcctccataacattctcctcttcacttatcagccgaatttgcctgaattactttaaaacaacaagaaggcagatatgcttgaatgaagaaaaagccaatggagt

SEQ ID NO: 29288 - DNA, 436 bp, Arabidopsis thaliana columbia
ttctgaccaagtcctttctcgaaatctagagtgataggtggcagtatatcttcctttgtcgctgtgagtttgcaatcttcggattctttagcaaagaaaatgacactaatcctatttttcacaagtccaacataataacataagcttaattcaattacacatgaagaagatttgatcaaattgcaataagaagatccaaattacatagtcacgaggaagaacacaacaaaattcacgtgttatctgctcaaatggatcacgaaatctccggaagggagaaagtgaaactctagcttccggagacggttgctactaacgctgaggagccgaatatcggaactggctcatacgccacggtagagaatgctgaagtcactgaactgtcagaagaggaaaatcagaaagctgttgtagcagccaaagagactctggattc

SEQ ID NO: 29289 - DNA, 575 bp, Arabidopsis thaliana columbia
actccatatcatatcaatcaatctcatcaagattctacattattccaacaaactactaattgattgtctagtttcaaaaaccatcgctaagaactagaaaacaaagcttagcacttaacagtgagagttgagagattatcgtgtgagctatacagtttgatgatacgatttagagccatataacacaggaatggtgaaatagacccaccaccacatgacatgaatcgctatcatacacatgggatgatgatgatgatgccgttccttttcttctagcacaagacatccttttttacttattttccaacacctttctcttttcttattttatggattttttgaaaatatataaatatttcgaacctttaattttagtttccattattgcatggttcttgtgattgggaggtgtgaccccaaattagatttatcaaactcaatttatatatgtatgtaataattttacaataatccggataatatatcagaatttaaatctatataacaatcaccaaaataaattaaattacactgacaatatgaataaattcaaaaaagtacatactattgtacta

SEQ ID NO: 29290 - DNA, 516 bp, Arabidopsis thaliana columbia
cttgaccaatatcttcttctttttttaacatccttgaccaatatcttatatatactttatttgtcataatcagttttggtacaacccaatttgcatgcttatgtagtcccatcattgttaagtcacatgcatgcaaatatctacaagacctaacatgtacaagaaccacaatttctactacttaattaaataccgacatagatatgcatacgtgactgtgtggaagaacacagtaaaaacctctataattaattacattacaaattcacaaccccaatgattcttaataattaattgatatggcgagagccttaattatataagtatgataggttcatgactcccacttcaatcaatagtcacataacgtcatgtacattgattagtacgtatcgatcatagtgatatttcagctaacttgtctcagttcctgaaaccgtacgtatcctcacctagatcaactagttatatcaactcacccggaaagtaagggtgagtgcgctacctagtttgtgt

SEQ ID NO: 29291 - DNA, 642 bp, Arabidopsis thaliana
tattcattttcaatttatttgacagaaaatttaagaattttgtatacatattaaatccatattaatataaatacattttaagtatatatactgtatatttttgcaaaatgtaaacacaaaaagttaacagatttttttatcaaaatggaaaaaacaacacataattacatactttcattatgaatttcaaaacagtaaataagatttgatgtaaaaaaatttgtaaatgagactttaatataagataaattactattttcttcattgcactgtatcttattggttaaatctatttacatcacaaccccatctacaacaaaacttcaccaaataactagtatataattgttaaaaaataattatcatatacaacatagaaaaaagtaatacaactgtagtgtaatatgtttttggtgatttaacccaattatcttctaaagaatacaaattgatggctaaatatatacgtgtaataattaaaggatggccaaaattgagaagaagaacaatgaaagtgagatagagagagaataagcagcagaagtcgtcgacgtgtttggtctttgagatggtatgtttgtcgcctctgggtcaaacgaagaagctggcggtctagctgaggaggaggaacggttcgatgga

SEQ ID NO: 29292 - DNA, 574 bp, Arabidopsis thaliana columbia
cacagaaactttaaacctaatccttctatgccaaaaatatatccataaataacaaaccttgacaacattatccatattggcattagaggcatggcaagctgctctaagctgcttttccatacgctggatagtactcgtacatcgcaaatctgcctccataaaagcgttcttcttgtaatcctgaatcaccaaagtattgtctatattagcataagacaatgagaggagaaatctcatgtgaaagatgcgtaaataaacagtcaggattcaaaaacaactgcttcctactgaacaacactgttttagaatctattacctcaaactttttctttaagtccttgtggagaagatcctcgaatttttttcttgctgaaccattccctacagcattagagttaaatatagccaaggcttttcgaactgcttcttcatgttcttccctcagtgcaccctacacatagcagaattgacatgaatcatatattacaaaaaaagaaaaagaaaaaaaaaacagtaggctaaagctaagatgcttacttcttccggagcttttgattggcaaaggcaccatata

SEQ ID NO: 29293 - DNA, 599 bp, Arabidopsis thaliana columbia
tcattgaggtttttcttgtttttcctttactcttcttatttcttctctagttcttttcccaaatctagttctcttcccagatctcttcctctccacctctttctatcacttcatcaatggaagtacaacgaacaacggcaacgttgattccttgacatagtgatcaaaacagtggcgatgaaaccggataacaaactcacaaacttaggtgaaaacgtacgtcgacggagatgatctcaatgacgatgacttgggtgcatgatggatatgtgataacactagattttaaccattttaagcccttgtttttcatgcatttagcttagtttcatgcttcttttcatgcattcatagtccattttctttccttttcacattttgcattgcattgcatagcatatttgcatttggagtgttttacaggtgaatcaggtatttttggactcgatttggacattttcgtcacaaggagtggacttgctcgagtttgtgcaacaaggaaggacatggagccatgctcgacgtatatgctcggctggagatcaagtgacacacatggaagaagaagagaagctgctcggcttgaagtcgagtgatat

SEQ ID NO: 29294 - DNA, 555 bp, Arabidopsis thaliana
tgcagccatgacttcacctttcgcaaccaccatatactgcagcaaccattaaacaattcaaaaccatcaacaacaaaaagtcttattcatgaaagaccaaatacatttacttaaagcataccacggcaagtattgctaagagggtaaaggcaatctgttgtgcctctttccagaaatggtcgccactaaaccaaccaccacctccaaaccaacctcctcctcctccacctttaccaccatttccgccaccggattcttctcttttcttgatctctttgtcccacttctcaaactcattcttcttcccaccaagagcgctttccaatgatttacgagcttgctcctgcacaatcaaggaaatcgaacggcagagtattagccaccaaatcatgaagctacctcttatctgtctctctttagttttgtcgctctgtcataaaacttttcattcagagagatagaaagtgtgggtttttgtacttcctggaatgaagttattgctaaccaactgctattctcatacgaattcccaaaccagagagagttgattaaaga

SEQ ID NO: 29295 - DNA, 575 bp, Arabidopsis thaliana columbia
caattggatttgtggattataacttcaactattggatttttgtgtgaacatgtgaaataaggaaacagttcaagtggtagaattggtgatccgtttctcatcacgtccgaagagttttgggctagttcttaacgtttctgaattgatcttgtttccaagttttcagaacaatttttggatccaaaatcggaggtaagatcgatcggcaaatcacgtttaaagttgataattagtcacagttttcagagccatatttttccaagtatctgaaactttgcagtttctggtagaggttttaaggatctatttcccgtcggatctgaaggaatcaaattgtgaatttggtgtcgttggaaagatctcgaggagagcaagaattagcaagtttcgttctcacgatccaaggtaagcttcattcgcaaaatgacttacaagtgaaaaatcacaattttcctgaactcaaaaaaatattaagtgtcaggaacattgcagtttcatcttaagggttttacgaggcgtttctggtcactcaggagcattgatagcccaacgacggtggtttctgcagaggaagt

SEQ ID NO: 29296 - DNA, 531 bp, Arabidopsis thaliana columbia
ccgaacccgattcccattcaaacaataaaaacttgtcatggtttactccatacaaaactgtctcagaaacatatgcataagtcagtaacgaaccgttagaaacgtgatccaccgttgaatatgtagatagtagtaccatgaacgtctgcacaaagttgcatccagatcagaatagtttcggacctccaaacgttgccgtcaacgagctccctcgggttgtcttttagggttttctgggtttgacatactttgcaattacttgaccagaaagaaacgtgcataacttcttgcgtttaaatctgattgcagatctgtcagttgatgtggattcttgggagcgtgttctttccatagacaccttattcctgatctgagtccctctggtctgtcgggaattcaccctacaataaaccttcttgaaattgttcttcctctttcctcttttctcttcttcttctttctttgctttgccactctccgattttactaagatctgcttcatctcacttctccttaatgacatgaaccaga

SEQ ID NO: 29297 - DNA, 584 bp, Arabidopsis thaliana columbia
ttctcaaactacaaaagagtggtaatccatcaaacaaacataactaggatacactaaaaacactgattcattgctcatataactaaactaattaaggatatagctcaaaaatctttagttatatgtttggtttatgtcatttaccatgtcctgccaatgccagtgttgtccgctccagacggaacgaaacctataacagaaaaccaataaagtttcagccttgaacaaacaatctaaaacagaacaaattggtacctaattaattttaatctagctttggtacctgagattttatttgggtggaagacgaagcaaatagtgaagcaaaatacagaggagttttggattatttgggtgatttggaatgaaagacgaacctgcaatcgaccaagttatagtgatttggaatgaaagatttgagctgcaatcgggaaagaagagatttttcttcacaaattcttacaaaaattttgatggttgtaagaagcccagtcgtaggaaatcatgtaatttccaatcaatttttttttgtcagcattccattaagttttaggtatagtttttatttattaaatttttaaata

SEQ ID NO: 29298 - DNA, 222 bp, Arabidopsis thaliana columbia
taatttgatatgaataaattgaagaaagtcaaaacaaaaagcccacttcaaaacaaataaagcccacttcaagtttactggaggtatataagaacaagggcaaaaccgaaaataaaccacaaagtaaggtcctattaacaaaaatacaatgaaagagagcataaagtgcgtcattttgtcatatcatttcacgtctgtgtctctacgaccacattagcataa

SEQ ID NO: 29299 - DNA, 554 bp, Arabidopsis thaliana columbia
gattttgccctcgagagaagaagctgtgtttcagcgtaacagagaacatcaaaagcaaataaacattaacgagaagatgattttaggtgaggatgaaaatgtaaaatctaaaccctaagatctgaaaacagggaacccaagggaaaagtgagatcgaggtcactcatatattgaggtaagcattaacaaaaatatataccataaggattgtaattagggaacccaaacaattagggaacagagagcaaatctgaaaggagaagagaggaccggaggtaagatggggaagtgagaaaatgtggaattcaacaatcagagggagagataacagggtaaggagattttaaaagatgaaacatgaaagggagatggttagctccgtcaatggcagcggcggacgagaaggcgttccacggaggtggtggttgcgacggcgagaaaatcttctgcggtacgaaataatggccaagttgttgaagcatcttcaactattgaggagaaaaataaataaaagagaaatcaaataattgagtgtaagctgaaaggggtgagat

SEQ ID NO: 29300 - DNA, 543 bp, Arabidopsis thaliana columbia
tctagaggataatttgtttatgttgtttgcaaatggagagcacatagtgtggagttgcttacaagataactaaagaggaagataaaagagatgctttattggtaagtgattactctcttttgttgcaatcatgaccaaaaagacatttatgttgtttgtttgtgttgtcagcatttggaagtgagggagaagcaatatgatcagaaagagtatcttgatttcttcactgtgagtctattttgttctctgtttctttttcttctttgggtgtgtgtgacaatggttactttgtttgtagcaggactctaatgcttcggaaccggctgtggcaggagtaatggtgtaagaaacgcatacgattacatcacgtcggtatatatgtaaacgagtaacaatgtcgatatatatcttctttatttgttcaggtacatagcttcacctgacaagaagagcaacaacaactacttaggaccagctcctcttgaagatattgccaagtaggtggctttgtttttttagcttcttcaaagattgcatttgaca

SEQ ID NO: 29301 - DNA, 575 bp, Arabidopsis thaliana columbia
cgatattccttcgctccagcgatggcttgagttagcttggaacaaggggtttgatgtttctggagctcttcattttgataatcgaatatgtggttccaagagatggattggaactactgaatgtgctgcgttgttacgttctttcgggttgaaagcgaggattgttgattttgctcccgagaagtctaaatcgatgtatctttcagttcctggttctgctattgcactcaaggtaaagtcatatggtcccatggacagatatatggttaaaaaggggggaagtgggaagggaaaagcagttgactctcatagttctaattcttctaggatcagcaaaggagcggttttaatggaatgggtttggaattacttctcagataacaggttaagtgtttcatccggtgttcatattacgaatagagggtaggttgttttgtttcagttcttgatctctgaaatgtcttttgtaacttcaaacacattacgtctaaggtgcctgagttgatgttatcgtgtgtactgcaggcccttgtatttccaacatgaagggcactcgaggacaattgtttggggtc

SEQ ID NO: 29302 - DNA, 636 bp, Arabidopsis thaliana columbia
gacataagtaaagtcgcgagaggccagcaagcaccaagaccagctcacactcccggtacggtgtcacccccaccggaaaatgaggcaacgtttcgagcaaagagaggagatagtggaagagagacggatgccgcggtggaagaacgttttccagtgactaatgaaacgcgacattgtttcaatcggttcatgcaataccataagtaagttttaaaattgagttccactaaataaatgattaaagtgcatgattaacgtagtcacgatttttttttttaatacgtacataggtgtattgagaaaaatggaagagatgcgaatgattgcaacaacttgagagattacgtacgttcaatttgtcccgaagaattggtgagcaaaatttggtagattttttttttaataagaagcttaagattgaagaataatatatgatcactccgataatattctttgattctatttttcgatgttttttatttgtgaaggttgaaaagtgggaggaacaaagaaagtcagggacattaccagcgtcaatatgaagattagattatcgcatgtcgttgtggccttgtggggactgtccatatagtagtattctataacaaactaatgacaattgaataattattgatg

SEQ ID NO: 29303 - DNA, 529 bp, Arabidopsis thaliana columbia
gattatttttcttcgtaacactcaaaattagaattgtcatgttaaatgttagtacatccatggatatagtttacaaaaaaaaaaaaaattggataaagtttacatactcgttgttgaagtatatatatatatatttttttgggtgcaaatatcaagttcaaaattaaaataccaaaatgttaaaagaatgacgaaccgataaagactgagtcaattcttcgaataatgaaatacaaaagtcaacatacgagggaccagctccagcaccgccgtattcaaagatcaagtcgctataaaaggccaatcaacgcgactcgacgacccaaataattacataataaaaaagtagtgtgtaaaattaaactacaataaagaatttctgaaaaacgttgtatattcttttccaaaaacatacattttcatcgaattcaaacagcaattagcgaaacctcaacactattattatataaatcacgagacaataaatcttgataaataatctgaaatttgtttccgatcgatgagaaat

SEQ ID NO: 29304 - DNA, 500 bp, Arabidopsis thaliana columbia
tgagtctttggctgatcacttcattgactttgaatcaaagcacataatgtgaaaatctaaaacagcaatatcattatggtcctgattccgaataatcatacaattcaatcaaaaaagcaacaatgatgagtaaatctaagagttcatagaccttcaaagaaacgcaaatggtcatcgaatgtctcagcatgccttatcttagtgatcgacccatcttcttcaacctgcaaaaacaaacaacacattgaagaaaataagttcaaattcatgacaatttctctcgggatcttgattctcctggaacaagaaaatgtgttggtacccagtattccggagacgcatcttgagattgtaagtggaagccatgctcatacagtatgcaccagcgtcatgaaccaccagaccagctccctgtaatgagtacaatagactcataagattccacattaccttgagacttcaaacagaatcatatccttatcatacctgtggaggagtgg

SEQ ID NO: 29305 - DNA, 346 bp, Arabidopsis thaliana columbia
taagttatagaattatacctagtaatactattactgctcatgtataaaaaagtagcatgcagctaatgagcaactatgaacagaatggatcaattaaaagtgtcgaacgccaaggttgaaacacagtgttcgatgtgaatcagcaaatggttaacttatccagctaataagcagtacaaaaaatcgcctaattaaccagccttaattcatctaacacgtatgctagatatcttatactgaatatcaggcgtacaatgatgtcaccatcagagcatctggtgttgtcaacatgtatcaaatggtcagtacagagatcgaaaaaggtaataccgtcatcaagcggtga

SEQ ID NO: 29306 - DNA, 525 bp, Arabidopsis thaliana columbia
tgagaatcatccacatatcctgcgacctacttaaaagggtctacctactaggtagtcagaaatataacaagaaacagaacagaaactagacactgcctaaagttcacaatgcttgaaagctattaaaccacaaaatggggcaataagaaccatatatacagatgaccataagcaatagaacctagacactctcaatgctctggaaagctatgcgaaactcagattggggtcaaccagagtcatccccatatcctgctacctacttaaaaagtctagctactagctagtcagtaagattacaagaaacggaaccgaaactagacactaccttaagtatgcaatgcttgaaagctattaaacaacaaaatggggcaatgagaaccatacacacatatgaccataagcaatagaaaactagacactcccaatgcttgaaggctgttcaaaacacagattggttaacgagaatcagacgcatatcctgcgacctacttaggttctagctaatcagtgcttgaaagaatg

SEQ ID NO: 29307 - DNA, 588 bp, Arabidopsis thaliana columbia
caaacacaggagagttttacaatcgcttcagcttgaaatccttaagttttatcgaaaacgattattgggggagaacagaacctgtggtttgtcgcccaaccggaagaagccttacagacgcagacagaacctcctgatttctgcatagattcgaaactccgaacggtaaagaagccatttctgtgtttaagccacaacacaagccgtggttactagtgaaaaaaataatgaaacaaaaatttaagggaggacgaagagattacagagatggatggttgatattttttggggcccataggcttttgcttctttagtggcgcgtgtttctcaccgcccaaaagacatgcgtgtagacataattgccatcagaattactcaaatacactaattgctctttttttccaagttcatgtgaacaatgggagattcattcgctgcacaattcacaatttcacaaatgggccaaatgtttagaagatatgaaaaaataaagtaactttaatataatgtaaacagtctggttttattattctccccaaagagataaattaaaatcactctttccagccagtgaacaaatggaccggc

SEQ ID NO: 29308 - DNA, 526 bp, Arabidopsis thaliana columbia
gaatgttactacttctactcagcttccatcggtcttacctgacatttttgagaaagctcctgagtacatacttgaaaggaagttggttaagcgtcagggaagggctgctacaatggtgttggtgaaatggattggtgaaccagtggaagaggctacttggaagtttctgtttgatcgtcaacagaagtttctgggtcttgatgcttaaaactttgaggtcaaggttctgctagagggggaagatttgttgcagaaccacacgtgtggagtgacacgtgcgacatcaagtgggaataaagagtattctagaagctgacgcgtggctattggagagtgggcgatcaaatgaagaaatagctctatcacacgagaatcaaaatctcatgtgataaagcttagaagtagaaacagctctatcacaatgaagaaatagctatgagaatcaaaatagactctcagagaaacagagaataaatgaagaagaagaagatacaactcagcacaatttttcatgaatgattatttt

SEQ ID NO: 29309 - DNA, 713 bp, Arabidopsis thaliana columbia
tcaaggcttccttaggactataacacgttccatgccagaattaaccgagtaagccagctatcgtcacttatccgcattctccaatcaaccctcgaccattcacgacccatacatatcctattgtccaaatggattcccctcgactttctaatgtttcctagaccgaaactaggtttccttaagctatcctagttcttagggctaacctaatggtttcggggtttaccggtagtcgcatcgtaactaagcttggttcgtctgatggagagtgatccctttaccatggacttgatcctattcaatgctccttacccatgacttgccacactaaatggccgaactgatcttgccttttttttgcttgatctcgcattctactcgacagactgtacgtccggccgcatagtcaaggttatgggcattacatccttcccccccttaaaagaatttgtcctccaattctaaggactaaggaagtaactagccttcaaggcaaaccgattcctttgttggttccatgaagctttgtgtagaaaggataggtttggtctcctccattttaatattgcagtattttcctccattcctaggaagttgatgcatgcctaaaggactccgccactatcttttcttgtatgtggttttagtcgtcaccgcatacggtttagctaacgatttgatttatcggcttcctagtactactaggcttggtc

SEQ ID NO: 29310 - DNA, 540 bp, Arabidopsis thaliana columbia
ttagatttttgcgcctggacggctttatccgtatttctgtagaacctatgcctgaatggctttatccacttattattgtagaacttatgtttgggatttttttttttgcttgaatgtttaaaaacttattcgttcccgaagcgttttattgactagggccagtgtgaaagaacttgcttttgagtgaaacttctcggttgcgaatatatccgattcacttcttaaccagcatttagaaacgacctggggtaccggtgttagagtataaccgggtttttgaagataaaagaattctgctcagaagtaatttgatagattttatctcgtacttatatagcgcgctgtagccgagcaggcgtaaaagatactatgagccgtcgctcatcgtattagccgaagcgtttaaaaaggtgaaaatgatttttatttatgccgaagtcggaaacttacaagataaataatagataggagtatggatatacggacccacttcccccttttttaataggaggggtagctgaactcgtccgaagacgagct

SEQ ID NO: 29311 - DNA, 448 bp, Arabidopsis thaliana columbia
ctaaaggatcaacgagatgatcttgaaatggtgctgtacccttattttttttttccatatttcttttgttctctctcagtttgtgcatagtgctgtttgtccttacgtcatagcacaatctcttgtcctcactttatggaaaatgtggtaaaaatcgttgaagcaaagtttgttaaagatggattttttttttttgctccaaacaaagtagttttgggtgagtagcatttgtaattctacttttcgtagtccttgctaatagtgtagcgatgtataattcagaatcagaataggtccacaagtccaggggaaaatcaattggaaaggaaaatgttgtaaatttccttcatggaggtgaagtagagttggtggttgatcaggttgggttgtgaggaggggtgggatggttggatggtggagcgggttggagatggtgtgtgggtgggag

SEQ ID NO: 29312 - DNA, 491 bp, Arabidopsis thaliana columbia
caaaccggttaggtatatgcaattgagttaaaccaatatctaaaccataatggtttcaaaggaaatgaaaacgaggccgagcgaccagtcgaccactaacctgaggttcgtgcaatagggatttgagttcacgatacaaattgttcaccaataacaccatccttgtacttggtgacataatattcaaaagacagtgattagatatttatatataattgtaccatacgaagaaaatactagtaatcacaactgaaatagaacaaacacaagatatgtatatgtcattatcttaattctgtaggggcctagatttatatgtctctttgtttctctcttttgaaacaaatcctataccaaagatcttaaaaattcatagagaaatcaaaaatccctctcaaataattccctaattattgtctatttacataaataaaacatctcaattatagaataatgtatcatcatctccttaacaatcgaactattacctt

SEQ ID NO: 29313 - DNA, 772 bp, Arabidopsis thaliana columbia
ttttttttttttttttttgcaggaacaacaaggtagaccacctccaacaacacaacaaaccatagcaggaaaactctttagaactcttttcaagggtcttctcttctcacaactaaccttaatctcacttttggtgatcgttctcaccattcgcggtctcatctcagcaagtacacaccatttccacctcaagaaatggtaccctcctttactagcatctgttgctgtctcaggaattgcatctttagcatggcaatgcatctttatctacaatccatcaagagcagtcaaagcaacgttctggcttagcccaatactcacctgctcggtaggaatcttgcttgttttgattggctcagcggtagatgcaggtataggtgcagtgtttgtccttttcgccattactcagtccctctatggttgctggattactccgaggcttgagtacaccgataaaatattatcacttgccacagcatttccacctgcaagaaccagagaagtagtctgcttatcaatcatagtcagtgtcgtttactctggtttcttggtgactggaattggaggagcaacttccactagaacaaatcttgatatcttgttcatatccgtaatcataataagcttagcatggacgatgcaagttatcaagaatgttcaacaagttgcgatttcacgggcgagatatgtaaactttgcacatggagaagatatggacgcttggaatgctttccgcatcactatgaaacacttgactgggagcatctgcgtt

SEQ ID NO: 29314 - DNA, 582 bp, Arabidopsis thaliana columbia
  unsure (1)..(582): unsure at all n locations
aagcagcttcgttactatgttgattcatcagttctagaaattgaaaatccccaaatctaattcgagctccaagaatctcaatgaaaacatttaagctaatttcatcgttcaccagaagaaactaatcggaagccaaatacgaaggacaattgaatcaacgattcaatatccttaatcaaatcaacacaaattccaaaatcaaatcgaaatacagacgaagcttcatcgaatgtattcataaacccgttgattataccagaaattttgagaatcgattgaaatgggaagagagggagggagagagtctaaccctcggcttcggcgatagagatcgcggagagtctgaatcggtctctaatgagatcgtccatagaatattcttcaacgatttggtctacctggagatcgcttatgtcttctcctccgacgtccatggcgacgaatagctaggtttcttcgcctgtgtgattgttgggctatccgataataaagggagaaatatacgcgggaaaacaaagtgtaaaacgcagcgtnttaagtatccctccatgtcaaaacgcagcgtttatatggagaatgata

SEQ ID NO: 29315 - DNA, 584 bp, Arabidopsis thaliana columbia
tgctatctggtgaaagagctacaagggtgtctcatggaatgtggtaagaactctttgagaaccaatttggatcatgagggatctagatgcgagaaaaagaaagactcaaagaaacggtttagaagtcgtctccattcccttgaaccatgcggaggaaatgtcagaatgatatgttacgattcttgaatggattctactttttgagatcgacttcactctttggtccccaatctcctcctcttttcattgtaaggcgacaaacacttgcaatatttttacatagtagattaattgtagaattgaactatttcaaatgaaactaaattcatagaagcaataacccccttacattaaaaatgaaaccatctcaacctataaaacataaaattttgcttagtttttttttttaataactacgattaattttagtaattcagatccacagtctgtcctacgtagaactcgcgcaaccatgagattccagtcttcaaatatttttctgcattattaactaagtattcaaattttaaacttaaataaattcttttgaagttatgttaaacaactggatggctacattatat

SEQ ID NO: 29316 - DNA, 1009 bp, Arabidopsis thaliana columbia
ggagaaaaggaaacatgaatttgaaatcaagcctgatcttgttagctttgtcaaaaaagattattgaaacctgcctgttatgcattttttaacaattatcaacaaaattcaagaacagccaatgtgatataaggacgtatatgtaaaaagatattctctgaaaactcaaagtttactatactataaagtagcaacctgattagttggtagacgcagaacgacctaacccgtcgttgactagttagttaactctactcacaactttatatatatatctaacattcctattttattattattccctaacactttcttttcttaacgtcaaacttagtgattagttcaatacaagtatatagttgactgtttatgatgcagaattattattttcgacaaattctcttgtgttgtgagtctatcttgtgaacattttagcttccatttcttcggggaagtaattctggaatagtcaattcgtttaaattcttactatgtaaaccattcagaatcttgaaatttccatgtaaatgaaatcttataaaaattaaactttttgtttcctggaacactgtctgcaaactcagagccgtcgacaggaaatagattaataaggaaaacggacaaaaataaaaaatgtcaaactttcttataagctagcccaacaatacagaccttaataaagagtgcaagtttaaaatgttttaggcccattttgtttatgtgcttttaaatgttaaatatttggaatgagaaaatttgacaattaaaggtagagagaatgggtctttacgcatgacccatattaccgataaggaacagtgacaaacacaacctccaactataattttccacgtttacatatacgagctgattcatcagtgacgtacatatatcgccttcacgcaataacaaaactcctagaaaataggagttaatatataagttgaataagagcataaaacaatatccatgaagaattcagctggaagttgggggttgacgtatgtgt

SEQ ID NO: 29317 - DNA, 626 bp, Arabidopsis thaliana columbia
atcatgagcaaaaatttgcaaatcctaattaatccatcgaaaatcgaaaccctaacagtaagaaatttgttcaatcacagatcttaagcagagatcaaactaatctgagaaaacgaaagatttgaacagaccaattagtgaagactttgaggaactgagcaagagcgaaggcaagaaaagcggagaagattgggagattgtgaggaaacagattatgcgacggaggagatccgtacaacgccctattgccgcgcactaacgaaccaacgtccgccgctgtcatcacctcgtccataggcgatatacaaccgcgaaaaaatcccgatctcttcttcttcttcgatcaaaatcagacactgcgaggatcaatgtcaacgtaaaaaggtaaagagattcaggagaagagagtattgaattgttttcgataagcttttaggctttttgtgttggtccgtatttgggaaggatcaattattgtgttaaaaggaaatcaattttacctttttaattttgttgcacttttgtttttcaatattgctgaatgttgactaataacttatttgatttgtgttagataaatttgatgacatctatttgatattgttctctttttgtatatatatgat

SEQ ID NO: 29318 - DNA, 556 bp, Arabidopsis thaliana columbia
gtgaaagagatacaatgtggagctgccaataacttacacgagagtaatcttatgaatgatgtttctgttcagacacaaagtggtaatgcagatttttgggaggagagattcacgtttgctgaaggatttgaggataccgagctcgatttacctccctggaaccatacccctactgatattgtagctgactctgaggaatacagtatcaatccaagtaaaagaggctttgtgaatccacggagttcaaagcaatcaagtcatgaaaaggttcctgaacctggtaaaagcaataaagtggttgtggaagacgtcttctcttcttttgagaagatacggactggaagctctagccaggtatctcagtatgaccatggcaaagcatgtcaatctctggaagttgataataaggttgggaactctgcaatacaagaaggattcgtcaccacgtcatggtcaagaagcgaagagaacattggtgcttcacagaccattggaaggattgttctgtacaactgttttccgttgtcaaaggaagccgtcacaaaagatatggtgt

SEQ ID NO: 29319 - DNA, 410 bp, Arabidopsis thaliana columbia
gctcgatttgaaaggaatgacatgatcaatgttctatgcttctatcatctagaatatttttcttgatttactcttataatttccccaagcttaaaacagattcatgcatggcgtttgatttcatacaagagatacattgttttcaatcaatatacctgactgtagttgcatttccgaggcacttggttcgacattgacttcagtgtcgtttttgttgttatcttcttctcattttgtaggattttttgtttgaccaagtcaccaaggagaagaatctttgagcaacttctactaacgattttaaaataacactcgccacaactaccacgtgaagctagcgacaataacgatatcaacatgacttcagtattcttaaagcagacacgtatgcttgtgcaccataatcaatg

SEQ ID NO: 29320 - DNA, 558 bp, Arabidopsis thaliana columbia
gaacagagtatgtcatgcagagaaaatattcataggtgttatcttgaacagaaatatttaaactataattcagatttataaacctttagaatattttggggagtaagttggttacttaggattaaaataaaaaatcagattacataacaataaaattactctgttttaataacaattaagagattatgttattacagggataaaaatgaagtggtttgtttttttaaaaaattattagcaggttaattaggaactaattatctgttatgtttaaataacattaaaattactctgttttacaatttaatggtttctggtttatgaagcaactagatcataacccgtgctatacagcacgcggcattaatattttgtataaattaaattgtatactttgttatgtttgctatgtttgtcaaaattatttgttatatttgtcaaaatttagtaaaatatattcaaatataattcgctttataccactctataactgtacaagttttctttgtttggagacgcactatctacatacaaaataccgtatctatgtttttgagt

SEQ ID NO: 29321 - DNA, 745 bp, Arabidopsis thaliana columbia
catcggcgatctattctctctgtgtcgacaagagaactgcatcgtgtattaaaagagaaatagatgattaattttgtgttttttggtttttctttctcgaagaagaagaaggataaaagataattttgatttctcaagaagaagacgaagaagaagaagaagaagaagagagtacttataagcaaaagttcggtttcttcaaaatcacaaaaaaaaggtgctaaagattcactttgtttggtaatggtagattactagattttatatagatttctagccgttagaaggtttcaatgaaataaagtaaattttgttaacaaaaggaaattcatcacagaaatttccttttcttttgtaaggttgagtattttcctttttttatacctttttttatatatttgggggatgtaacttgagactgaagcaaccgctgaacatcctcaaaagatatcaaaggtggcagagacgtaacgggtttcttaaatgaaccacaaatgggaaacaagcattgactgtcagcaaaaaccctagtgtactgccacaaacccacgcttgatggttccctgagaaacccaactttcccggagacaaatctctaaatacacaaagagggatgaaaatatcaactccattcccagaggaggtcgctgacgcttatattatgtgcacgttgaggagttaatcgctaagaataagatgaagaatatcaactccattccttgaggacggctttaagactatttgt

SEQ ID NO: 29322 - DNA, 523 bp, Arabidopsis thaliana columbia
ttttggaagaaattttgtgtgctaattgtgtcaatctttttttttttgttaaccgatattaattagagctcaacaaagtcaattcacgtaaaatgttgtttacatatgtgatatattgtggttcaatataattttttttgtgcaaaattatccgtatttatatttgcactatgaaatattaaaggtaaataaaaacttatgaattcttctttattaattccttcaaatatactgagaataataattcttgtaaactagagaaattttaacattaacctatttttctattttctttgggagttcctattaaggtaactttaagaatagaaactagttatgtatttaaaacgatacaaactaggatatctaaattgtattaaaaagattgtacattcaaaatttgtatacgagatcttcaaattttgtatataaacatcgaattatataaaatatttttcataactaacaacccatatttgtctctttggcggtcaactaaacctttttttatagcatatatata

SEQ ID NO: 29323 - DNA, 579 bp, Arabidopsis thaliana columbia
tcgctgggttttatgttccggccggccttcaagacaccgcaagcttgtggatggcgatggttttcatcatcatgctgtggtttatattcatctcaaagtaggctgcaaaagagcgggagaacggtctattccactccaaacttagttactttatcgtatccatacatagaactttgaagtatgcttttaactatatgaactaacttataatttgaatttactacataaacaatcaaaatatggctgaaaccaacaaatcaatagatgccgttagttaaaccgttaatgtagctgactaggatgccacatggatagactttacaaaaacgaatctaaacaacttaaaagacgtcgtatctgtgacatctactgtctcttgaactattgtgttcaagggacagtagatgtcacaggttcgatatgtttagattcgtttagattcagtttacttctaagaaaaatataatatttttttttaaaaacatatatttcatcaagcaaacctgaaatagccaaaaagatttttttttaaaaagcctgaataacaaaggaagacaaagggtccataacaagaaaaga

SEQ ID NO: 29324 - DNA, 496 bp, Arabidopsis thaliana columbia
tgttcctgtttttcacttctgtcaaatggattgtcttctacttttctctggctaaagtgtggcgggtcttcttcttcatcctcatcctcatccattttcatatacagacctagatgttctaatggattactgttgctttccatcttgaaactacccaaacccaacatatcctcactaaacttgggactcatcacttccatggaagtcggtaattgatcaccttctgtacctgtagctctaagcatctggaggtcttccataaaccgtatgccctcgtttatctccactgtcttttccatctgcaacagaccagaaagtcatttatcatgattgtacaccatggtagggctctgaataatagaagagaaactcgaaaagtcttttataccttttgtaaagcttgacgtgcagcttctctctcttgctctctttccctcctcgctttttctgcggcttctgctttggcttttctccgagcctcctcagctgctttggc

SEQ ID NO: 29325 - DNA, 521 bp, Arabidopsis thaliana columbia
gatgaaagagtgtttcaagctttcaatttgtgcctgatatacgatttgttttagtttgatatatatgcatgaattatactttaacgtgaattttttcggttttcggtttcggctttcaaataagttaataatacattccattcatatgaaatattacaaaaattgttgaagaggtgtcatttctatgaagcgagcttatcttggtattacagctgtgatgataactataatgataataaattgtatatttgaccagttttgtctacatataaactactataaatcaattatagtaattaattaaaatataaacaatttcaactcttactttttaaatggtgatgaaatggcaagacagctcatttaactagcatatatatagatgtatattattctatatattgtgtgaccaaagtaccaactctcttcaaacaaaagatccgtataaaaactatattgaacaagacagaaaatgacagtagaagaggtaggagatgattatacaaaagatggaacagttg

SEQ ID NO: 29326 - DNA, 568 bp, Arabidopsis thaliana columbia
cagataagaagagattttagtttcgagaaagtagctcttataagatattttacctcctctagatggtccaatgactctttctcagttctcacgcattctgtttttacactttgatcacaaagttacaatttctagcaggcttcagaagagatattcccagtcaatagcgtccctcgaaacccttcttcgatatcttgagcccccggtttcttttcacataactcatctgttaagacataagatgaatagttttacatggacatctcgctaaccagacagcagaataatggtaaatttggttaccagcaatatcgcggtgttcatgcatctctgtatctctcacccaaagcctgtcgccggggaatatgttcatgtctgcaagggttgcagattcctgatcaatcacttttgagcctttgtggagttcctggttttccttcatcacctgcatattttattgaaaccccgttttgttgtgtttcttcaagttatctacagaaacgaaaaaaacactatgtctaaaagaatcttaccccaagtaatcccatatcatcactttaattggtat

SEQ ID NO: 29327 - DNA, 409 bp, Arabidopsis thaliana columbia
ttttcatagtttttttttaataaaactcggtgttattagttatactatttgtaaatatcttgtaatcttaaggttatggaactaataaaacctcatataaattaataatcgataaattaatacccgataaattaatacattttttctgtcctaaattttgtttttggatcaattgataaattaagaaaataccatagtctcatctatattaaattattaatttatggaaattttactgtgtatagttttaggaaaaatataaaaataataacaattttcttaatttcacaaaaaattactaaaattcacgtttagttggaaatttacgaaccgaagtattgggccttaatggtcttgggccaacatcaatctctcgccgtcaaggttacatttatcgccgccgctgaga

SEQ ID NO: 29328 - DNA, 508 bp, Arabidopsis thaliana columbia
ctgcgtgtgttactttaggagaatctcaaatatccagtttggaatattttgtttgaaatcataataagatccttaataaacataaatctttctcatgatccacaaacagacatcaacgaatgaaaaaaggacaacatcgtgcaacactaaaagttttcacattatccggcatagttgcaaatctcccatcgtaaagtttttaggcggacgtggtgtaggcgggaaactcttagccaccggttctttctgatggaatttgtacggtggtggtgctggtggctgcggatggacctgacgtggatacggtggtggtggtgggggacatatagtgggattgtatagttgaggttgattcatccaataatccggcagatgatagtttgagaaaccattaggaccattcatgtatggcggatgatagtttgagaaaccatcaggaacatttatgtgtccgacgcataacgttgtccatcaaatggtctttccgattttccggctgcttactctg

SEQ ID NO: 29329 - DNA, 371 bp, Arabidopsis thaliana columbia
tgtcactataatactcttcccacagggtcccttcatgtgcgtggtcctctgctgcaccatcagtaggacgcgtggcgtgtaactgtgtaagcatgtactgcagccagtgaagtgccttctaactcttctaggccgccaccgtaatccgcgtcggtccacgccccgaatcgatctgcggaccggattgctccgttccgcatccgaccaggacgcatcgccggcgcccatcagcgtccctcgcgacaatttcaagcactctttgactctctttgcaaggtccgtatcatcggtacctcgcaggacttgttcgctagcggtctcgtcgccgtatttagcctgtggacggaatttaccgcccgattggggctgca

SEQ ID NO: 29330 - DNA, 526 bp, Arabidopsis thaliana columbia
tacatcaaaagattcatcctttttttaataatctgagctcaatccaatccaagacataccaacttcaaacaactctcttgtcctcgcccctcggatctgtttttcagaccaaacccatatcaaaagtttcaacatttaagctcaaaacagagccaaatcttgaatctttctcctccttgcaagttatggtagtagaagagcaaagccttgaaaacggcggatccgtacatgtggtcaaaggagaaagtaatttccgtaatgtggtgtgtggtcctgtacggtggctaaagatgttgtcttcagagcttcattggagctttgtgtttggtgtagtctcactatatggaattaaccaagggcttggtggctcattaggtcgtgtagctacagagtattatatgaaagatgttcaaaaagttcagccttctgaatctcaagctctcactgcaatcactaagattccatggatcattaaaccactttggggcattctcactgatgttctcccatctttggttccatagac

SEQ ID NO: 29331 - DNA, 437 bp, Arabidopsis thaliana columbia
agttaataaccgaactgaaccgatagataattatataattatagattgtttggaaatatgttctgatgcagagtctggactcctgtactcaggtgcttgtttattttgggccgaaccagctattcgaggccggatatggagttcacgtttcacacattgtttaactattattgttcgggtgagaattatgagttgttaaggacggttgatcttgtttaatttcaggtgctcgagataactggagaggttagtattagagtagatacgatatatgtaaatcctagatttactagatacgttcttatcttctatgagcaactctccttgtataaatactctcttcgactattggaataaacacacttttacattatatttcattgtatcagagcaaaagctcttttgacctaaatttttttccacgcagccttcgttgt

SEQ ID NO: 29332 - DNA, 480 bp, Arabidopsis thaliana columbia
ccccgtgatctgcggttactccttgtaattttagaatccttgacaaattcttttgatcaaagaagcttatgctttagtagtttttgtttgtgctttctctaatgatttttgtttattgcattgcaggaatcggctgaagttgatagtttgaagactcccgtcaaagcaagacgttctagtcaaggtccagcaaaacagctgaaaactgcaaagaccacggtagaatcttcttcagctagtgataagaaaataactggaccggatgcagtagtgccagctacacaagtttcagcttcgggtccagagactttgccacagaaaccaccaaacaggcgtaagataagtttgaagaaaagtttacaagaaagagctaaatctttagaaaccactcatgacaaaccacgtagtttcaaaaaactttcagaacatgaattactacaggtgagtctctaacttcatttttcttatacaaatcaaata

SEQ ID NO: 29333 - DNA, 515 bp, Arabidopsis thaliana columbia
ctaaagagggcagttatcgtcacattttgaagtgtcaacgttgtcgtcctcgttgaggggcaacatcagagcaccagcagttcttgtctaacagaatcgcgaaagcctgtcgctgcaatgatcctcgcagttaccatttgactgataaatggaaaagtctgtgagagttagacacgcaagaaatctgtgcaaatatcaaaactcactagcggagccgtcccggtattgacactagagcaatatgtgagggaactggaactgtccacggatatccatagtgttgtccatgctagcagagcgagcaagggcacgaagtggttattcatggcatcgggcgtcgtagggggttatatgccttgtatctgctcgaatcgcggttgtaatagatgtctatttcttcagatgtagttcgagttctcaattctccctcacagcaccagtattgaacagtcgatcgacaagatatgaacagatatcgcgtagaaatgccggattttgtcaagctcataataagg

SEQ ID NO: 29334 - DNA, 471 bp, Arabidopsis thaliana columbia
ggatgtgaatcgctcatgtttacaacagcttgcttctctatgtcacttccttcattagcctgcccaattctcagtgcatcaccagattcacacttaacatgtcttaaattctcgtttgtcaagattcctttctcagaacccgtagagtagaatctctcatcctctggctcagaaccgtaatccaactgttcaacctcttcattttcttcccaagggtatggttccctcaactctccatcctcaaactgggagtcataaccagattggcaatccttgtcatttgtagcagctgcatcatcattaggcctagatggtgatgaaaattttgtatgttcatctgatgcaattaccccatccatactgtccttacttccgtcaacaggttcgctctctttaggggcaatagactctgtaatttctccctcttcatctcttcgagaggcttcatcttctacatcacacggaatattt

SEQ ID NO: 29335 - DNA, 311 bp, Arabidopsis thaliana columbia
tatagaattctacatgattcgttacaggtttgagttaaaatcaagaatagctacttttttactttgattttacatgtctctcatttagtcttcctctcgatcgatctctttggagatatttctacttctatctatatattaattcatacggttttattgactagtgattgtactacttctatctatgttttgattcatacggtttagtcttcctcctacgtatccctcaaacatattcttctctctcccacccctctccccgtcctctgaccattcaatttcgtgttttcttcccgtggtgtgttgttttc

SEQ ID NO: 29336 - DNA, 834 bp, Arabidopsis thaliana columbia
ctgtatgttaaaagtaatttatgttatatttgctaaactaattgctattaataaaacatttatttgagaaacagttatacaaatgaatattttttgcatattaaactgattatcaatttcagctcggaaaatatgaaataaattaattagtgattgaatgcaaacatacaatattcttccttctaagggcctgactggtttaaacgcagctagtgcggttgcgactgcggaagtttgcggaaacgggcggttgcggtttcaagggtgatcaagtgttttgaacgactgatcgagcgtttgataatgtgtgcgtttgcgagagttttatgactggtaaacatgcgggtgtgatagtaattaaataaaaaataagtaatcaaaataaatataatatattactattaaaaaaaatataaataccatacattatcctgataagttgataatattagaaaaattgaacatttttaataattaaaaccataaataaaactattcacttgcgtttgcgggtggcagagggagaaccaatcaatccctaagtctggtgctttgcttcattctcttgttcttgggctattcacttaattcacatgaattagatattagtctttttcaccctcacaattactgatctatatttctttctttctttcttgtgttgtaagtagttttacctcaattttttctggaatacgggcacaacttgacgatatgaaaccaagacagctagattaggatgggtactctttagtgatcaatcatcaaaattgctcgcacaagaagcaaaaattgcatgcttatgtgatcatgatgttattagactatcctcta

SEQ ID NO: 29337 - DNA, 847 bp, Arabidopsis thaliana columbia
tcgaatcacttagacaaaactcataaattagtcaaagcacttatgcatcaaattcaaattgtcgaacgcgcaacacttatgcaaactcacaaaaatggactcacatgttagtcgaagcacttatgcaacactttattctaaactagagccgtccctatgatttacaaggctataagaaaagaacaaaagtaggtcactttatacatgtttattgtaaaaaagaattactttacacgtattcataataatagaaataaggtagagtgacaattctttctaatgttcatttgaaataaagttcaagttatttctaatggaaatttaaacttaaaaaataaaaataaaataaagtagagtgaacctaacattttggaagatttgaatttgagatgtatgagaactaactcatctccgacccgaccacttaaccacaaaacaatttcaaaattatgaagcagcaaaacataattatatgataatcggccgcaagcatgggcttgacccgcttgtgctcacggccggctctggtctaaacacttacgtcacgtttgaacaaacacatagttgagactcttatgcaaactcacatgttagaaacacttatacaagacactttatgcaaactcataaaccctacggtttagagtttagggtttagggatttagggtatagggtatagggtatagggtatatggtatagggatttagggtatggtataggtatatggtttaggatttagggtttttagatccgtgagactggtcaagctttcgatcgcctcggttgtcgtcttcaagttaaaaaaatttaacatcatgttatatatcttaaatttgttactattt

SEQ ID NO: 29338 - DNA, 582 bp, Arabidopsis thaliana columbia
ttgtttgtttcttctttttcatgctttaggaaaaaaaaatgttacactgaacaattgttataatattgtgcatttaaatctggtattgaggtttagttgaaatctattcaattaggcacaaactcatgaaaacagtttgattttcatatatatacaattataagtttatattattttggttgaattgaacattaagagactggtctttaataaaaacttaaaagttactcttttgaaagtactgaaattagaaagaaaggagatatatgtcgaccatgttgaatataggaatctgcatccctttgtacaactcctttccttttttatcaacttcttcactacactttcagtttaacgttttccccccatagaaaatactttagagaagtttagatgaaacttatttttagtgagatgagactttgacgagtaaaccaaagaaggcagaaagaaaagaaaaaaagaggaggctcgagtaacttgacgagacgctcatttggacccaccaataatttgattgattaggtattacgattctttattacttctatttattgataatttcatttgctatgatattta

SEQ ID NO: 29339 - DNA, 574 bp, Arabidopsis thaliana columbia
tatttggtaatgtaagtcgaaatgatcaagacttagactatcatcttgtatcgtttcatcaatatttctttgataaacgttaatcagctttttaatttctatgattatgtatcaattttatttagactaagaaagtcttttaagttaaacgcataaaagagtcaaggataccatttgaattgacattgtattagtgtttgggtaacttccaagaaagagataaaattaaaagataagaatggggccaaggcgtaaagaatcaaaagttaggcgaaatatgtataaattgaattgaacgcgttttttatgagacttgactatgatccattttccacaacgcagacacaaagataatgcatttttattacacaagtgtgtatgcattatttcacaaatttcattaatcccaaatttcttcgttataatattcctgtcatatatgtgtcgagtagtgaaaaacgagaaaattagttattgttttattgaaatgaggtaattattataccaataagattccgttttgtttcttcgtagaataacaatagcgctttctgacaataatagcaaattttta

SEQ ID NO: 29340 - DNA, 500 bp, Arabidopsis thaliana columbia
tggcccatgaatatgattgtggctccgttaatcacgtggtattaaaactcacacacgaccatttctcatctgcctccaattatagcgaaaccgttacaactcgttgttcacgtgagcatcaaaatgtgcattactcctttcaagttcggcaaatcctaattatccattttaatggactgcagagactttaattagagcttatagaactttaaacattttggtttaaatcttaaaatagaaatttaaccaatctcaaatgatttttttttcttttcttttggcataagtttcataactcgatgatgaatgctacgataatatagacatacagtatgatgattagatgaaaacagataaagaagaaaaagtgtatcgtacgccccactcggtgataatgattaatgagactatatatgagagtaccaaatatgattttaccactcatgaatcgtattgcactatttctgcattattaagatagacccacatttcacattaga

SEQ ID NO: 29341 - DNA, 554 bp, Arabidopsis thaliana columbia
ccgcttcacataatcctgaatatatggcagtctatatataatagtcttgggttgttagtttgcataggttgaatgaatgctatcaataaatcattcttgttatggaacatgaactaggtggtattagttagatttattgcctttttgaacaatggttaaaccatttgatgatattgcttacctcggtctcaaagatttccctagaatcgcgataagttaatttatcctttgcaattctgtattttaccagttttttctggctcttgtatgatgggaggctaatcttttgtatatactattgcaggctttgtttatttttgggagtggtgtgcattatttctcctctctattggtatggttttgtcgttttttccaaagaaatattttttttgtgatatactcttggcctctgcggttttgaatgtcgtggctgagactgattgggattcagtctagagaagaaggttagatggtgctaattctcttctctgcagattgattcaaaatattggttatttgttgttctttgttttgtttggtttggttttatacat

SEQ ID NO: 29342 - DNA, 566 bp, Arabidopsis thaliana columbia
tctatttgagagttccattattacaggtttccattcatctagaaagaccctgaaatcttgcccagccttattctgaagatctgtcgactttgaagaatccaaggccttgagtaagaattcaaggagcacagatgaaatttctgcggagaaagaagggtataactcaacaaggctgcttacaatcttccttatccttttattagaacctgaaaatcacaaaaataaccttatatgaccttacgaattaacagatatgcgaagttaaacacgaaaatgcaacccaaaattatttccatctctaaagctggaaaaataatctagtgcagccaaaaccaatgtatcatgtcattataaacttcatcgaggtaaacaagcaagacaccgatgggatcattcccatttttttgcttggtgttactacttactagcccttccccagcacaagatccaagatacaaaagaagtattacatttttctttgaccaaaggggagtcaaattgaggagtacgcttcagctgcaaggagaaagcaagtttcctgagtttggatttgacttctctctgat

SEQ ID NO: 29343 - DNA, 440 bp, Arabidopsis thaliana columbia
agtagagaatggaggaagaaagaagaacatacatgtgagagttaggcagagcaagaccagaaaatatctgattcttcttcgctgagaatttttatatgagaaaataaagagtagttaataaacgcttttaagcagatttgagaaagagagagagagtgttaaaagacgttgatgcggttttgtgttgtttttattgggacgtggggttggctcacgtttttccacaaaacatctgtaccagtctacactgcataatgatgcataacgacgaacaaagcggcgtcgttttagttttttaaaaaagtttctttcttttttgacttcttacttttttttattactgaaaagtatcgtacttgctttaacgtaccttggacacgtgtcagtaggcgggagaatcggattcctcgactcttatctcacgctaaaccggcgattct

SEQ ID NO: 29344 - DNA, 485 bp, Arabidopsis thaliana columbia
tccccacttaatgatgtaatactaatagaaagtttaattcaactgctatctaattttgttttcaactcagttaatatctgataatgaaataaagtaccaattagtaactatgtaattgtcatagttatttggataaaacaaataaccgagtgtttgatgtaaaagagcatatgaatatcgaaacgtttttggtttacaaggttaacagactaacagtgtataataaattatgaatctactggtttgtattcttgtggtcaaatcattattatcacgatcaacaaaagataactaaaaaacaaaatatgtatactaaatgaaaatacgtttgttcattccatgatgaacaaacatttacaaaagccttccattacaaagaaagcagtaaccagtagtaggttttacataacatacacaacttatcacacaattataaataaaatcaagaaattgagttcttgaaaactcttaagaaaaacaaaaga

SEQ ID NO: 29345 - DNA, 244 bp, Arabidopsis thaliana columbia
agaaaccgagatatttccaactcagtgaacgcatttctgagacggagcagataagagagaaccggttagatgactcgataaggccgatgtcccgagttggacgaacagctctacagatatctagaagcgtagattcgatcaagaggatacctgcttgagctgatcctaacggaccaatggcaccagctcgatggaagcgactgagaccaggagacactgcactgacggtatatgatgaaattca

SEQ ID NO: 29346 - DNA, 249 bp, Arabidopsis thaliana columbia
gactcacaggagatagagttctagtgttgttgccaaattgatgagtcttgaagtcatagcagacaattctgatactgaacagagaagagagaagcggttttgtgactctctaaggccaatgtcccgagtggaaccatcagctctacagatatctagaagcgtatattcgatcaagaagatacttgcttcagctgctactaagtttccattggaactagctccattgaagcacatgaatgctggagactc

SEQ ID NO: 29347 - DNA, 624 bp, Arabidopsis thaliana columbia
agactatcatattgtttttcctgttttttaactttttgccaggaaatcaaattgtatagcgttctaactcatgtaaacctttcccttcatttatatgatatttgcagtttagcaaaaaaaaacatgggtagtttttcaaacccaaaaaaagtgtatgtttcttcacgataattttttaaatataagtctccaaactaaatttcctaaaagtgctactttggcatatagattgatattgtaactagtagcaccaatgttctaataagtggtacatacagtcggcgatgcctgtctaggtattagtatttacttctcctgtttacataattagaattttagaatccttgcatcccccattcatgaataacaaacataacccttaattgtttttgcttctccaacaagctttgcaaggtcaagaaggttgttgcaacttttgtgattccacgtctcacaatatccctgtccttgacacgatatctcatcatagctaggcttttctcagaccatatatatgaacatggtcacagccttagttagctttctaaatgtatttagaaatctttggtaatttaataatgaacgcttgaaaaactcaaaagaaaacagacccttcaatataat

SEQ ID NO: 29348 - DNA, 525 bp, Arabidopsis thaliana columbia
tctcctctttaaagccccttgtggctggtgtagattttggtgagctttgtttctttactacacgaattttttgttagttttttttttgtgttcagtatcactttttatgttgatggtttagctgtggaacacccttgtttactgtgtcggattatgatctgagatgtttctcaatcagcttctgtaggatttgaaagtaatatataataaatccttaatttgattataaaaaaaaagatgtaaatttcttcatatttttctctctggctagaacaaatcataactttatgaaactgacgtcactacaaacatttattaagagcagaaaattgtttattttaagagtgttaacaacaaccacaccttaatagcattttaactttgaactttgaaacaacaagagagactgatttatttgcatttagtgactaacaccttcagcctctccttctgcatatacttaattaaacgcttcacaatttggacctcgacgatttcgattcactctgcagccaaaaccagaat

SEQ ID NO: 29349 - DNA, 515 bp, Arabidopsis thaliana columbia
tggcactacatatgaaaaataaaactaaaggctgttttggtcgaatcagtatttttgtcttataattttgacctcagtaagagaaagagctccaactattttttttcttttgtaaacaaagagctccaacttacggcttcctttttttttgaataatacgaaaactttttaacacatattgaggatttcacaaaacataaattgatttactgcttttcaatttatttaatttcttgggaaattcgatatcaaataaaacttatctaaaagaaaacttcaagaaaaaaaacagaaaaatgaagaaaacaaaaaaacgaaaaccatattcgaatccccatattaaagtggagatcacagaatcacagcacatacataaataatctgtacaaagatgtgatttgataaatgataaccctaccaagtgtacaggtacaaagttaccaaatctggaatctctctcagtaaagatcataccggaatcacgagatcgcggtattcaactagagtgatcaaga

SEQ ID NO: 29350 - DNA, 580 bp, Arabidopsis thaliana columbia
gagaagaaaaatcaaacatacatacacacaagtctcgctaagagaaggtcttgggaagaagacgattcgtcgattcaggtttctgctatcatcttcctcttcgggacacagtttcccttttcctttcttcgtcggaatcgcttctcttcactcaccggttggagaaacagttaaattctgacaaaaaaaaatgtcgattaatatgagaacgctaacgcaagcactagccaaaacggctgcagtgattgagaagacggttcaaaccacagtccaggaggttacaggtcccaaacctctacaagactacgagcttctcgatcagatcggttccggtggtcctggtctcgcttggaagctttactccgccaaggcacgtgactccacgcggcctcagcagtatccaacagtttgcgtctgggtgcttgataagcgcgctttatctgaggctcgtgctagggcgggattatctaaagctgctgaagatgcgtttctcgatttgattcgtgctgattcggggaagcttgtgcggttgagacatcccggtgtggttcatgttgtcaggcgcttgatgagaataaga

SEQ ID NO: 29351 - DNA, 345 bp, Arabidopsis thaliana columbia
taggtttatcaacttcataattcttgattaaaagtttgccacaaaaaacagtcaaaactgtaaaactcattagttcttttatggtagaaaagttaaacaaaacagtcaaagtttttgaaacatttatcaatagtattttatggaagatggttaatatcaattgactaccattgtagatcattaaaagcaagatagcctctatatatatcttagtaacttttcttcataatgattgtattactggctctgctcatcttcctaaataactacatcagaccaggattcaagtgggaggccaatgcagtattcactttcgactttcaaggtatagaaatgtagcatatc

SEQ ID NO: 29352 - DNA, 475 bp, Arabidopsis thaliana columbia
tccctgatagttttgaccctaccatttctgttttccattctcgtgtggctcttatatttccttgttgttgtattttgtcactattattactaaaactagcctatcgtaaaagacaccatttctgttacaccaatgataaataacgtggaattgattacaaattaccaaaaatacaaacatttccgtggacgagattagacgaactcgaacattctacaaactttgacaaaaggaaggaaacatcacttacaaagtcatttgtctaatatagtttctactttaccattggagtcctagactctgaacctaagttcgattccaatatatagatatgacttttcagttatgtaacaacatgcatttgaatcaaatatcaggctttctctttggattttcttctgaatccacgagtaccatttggtaaccttgcatatacggctatacatgtaataatcgtacatgcatggtaagttta

SEQ ID NO: 29353 - DNA, 586 bp, Arabidopsis thaliana columbia
caatgaacatattggtgaattaattgactaaataaaaatccaacatttgctatcatattaattaatctgaatcatattttcaaaacttttcaatcaataggagtaaaacaatatgctcaagtccaaaatgtctttgttaagatcacatgttgcacatgctattgacctaacttctgttatcagcagagtgctgctatacatgcagttccataaatttaaactatacattgcataaagacacattgacgatctttcttgcaaagtacatatatattaattacacgatcttgcaggacaagaatcgtttaactagttaatgataattaaccgcggtataggaaacaattcgcgtagatgcaatatctgcatgcatgtaaaagtatatcaaattaattaagaagaagcgacagaattcccaaggttaaataagtaagaccatatgatatgaaaacataatattttttgttggaacgtagcaattgaagggagagggtaaggaagcgacggtcgagaaggaaggagaagtgccggagagtggtgatcttgtgacggtaaggccaagttgcggcagttggcgcattaggga

SEQ ID NO: 29354 - DNA, 773 bp, Arabidopsis thaliana columbia
tataggccattggaatctgaccgacataacgcttagtttaaatctaaccgttaaatttagatcttacggttcagatctgttgaggtgacgctgaccgatctagctgccccggaaatctgccacggatggctcagatcttcgtagttatccacgtggagttattttagccgtttgttcgtgaggcgtcgtgtgtatgtgttattattgtatttttttaataattcctacgaactttacaaaaattgatgtggatttttaaaatgattttcctttttttgtgagagaggcaaactagtcatttctatgtctgaatgggtcccacactgacttttcattattttttgttttctttcgtttctttattttcggattcgactctctcattggtcgctttttattttgccaggtcagcggttgccacgtggagacagctaggatctcggtttcatgaatgctcctcgtaacttttgaatcttgcccttaaactggattactcctagctaattaaagactaaatcataactaattaatttgctatgaaataagtataaattgcaatgagttgacaattaaatattccgaccacaaacaaaacccataagatcaaaaaactcatttctcatcgccgggcggtcaccgactagacggcggacgaatttagggcaacaccagttagtcggaatgacgaaaataccttcttgtttatgacccaaccataccccaaatgggcttttcactttcagatgtctgggctagagactgctaaatattga

SEQ ID NO: 29355 - DNA, 597 bp, Arabidopsis thaliana columbia
tgatttgtgtaaaaacatatacatatacatatacatatacatatctctcgcttttctgttcatcacttcagctgagtttctcattcaacatgtaacttttttttgaaatatgttgcaaaaacaaattccaacatatttataaaactagtaacattattatttataatttgcaaaataggtcatgaatcccttttttaatcttttttttttttcatttcccctcatgtttaattattaaactacttaatagtataatatttttcaaattttctatttatatacaaaagcctatgtttttttttctataatttgatatgtagtgtctaataaattcaaaaacatttttattcatacatctcattaattgttaagatgtatacaaattgatacatttttattcgtacaacttatttagtatacattagctatgaatatatgaataaaatatgtatattatgtacatttgtatactaaatgtgttgtatgactcttagtatacaaaacaacacaaaaaactttatcaaaaaaaaaaaaaaagctcccagacccgactcccgaggaaacctaagcttcttcttgctatggccttcgtggcgc

SEQ ID NO: 29356 - DNA, 646 bp, Arabidopsis thaliana columbia
acacaaaagaaaacctatcataataacaacaattacaaaatggttgtgttattatgtatgtacaaaaattggcaactttgcttgtaaaactatgcactatatttcttcttgtttttctgttttcattgtggtgtaatactttgatatgtgccaatgccaatgtttgtgtactcgggaaaacaattaatgaaaaccaaattgttttgccttctcctccctctttttattttatacagatgatattaccagctaaaagcatatctacatagactacattaatagttataatttataagttcatgtgatttaaattatcctccactgaagaggattaagacagaacaaaaacttatgtgtttggcacttttttgtcagcttgtcgccatcacctaattaaacaacaactaaagcacaagtcaattggtaagatcgtctcaaattcaattaatctacaccaaaaacgaattttgttgaacacttagttttgagttgacattccactcactagtttaagctcatagaatttgtaacgagagcttacgcaggaaagctgttggttcaacaactaatttgcgtcactttacttaaagtatacaaacgtcattttcagaaataacaatatcaagaagagcgtgacaaaatataa

SEQ ID NO: 29357 - DNA, 570 bp, Arabidopsis thaliana columbia
cttaattaggttaaggaaaacgcgagagagaagcaagaattgatagaaaagttacatcgagtttagtccattcaagcacgtcccagcttccggtaccttccatcttctccgacgaacatcgcagcgatcgtgatcgcccggagagaggtctcagcgccgtcatgtaaaaaaggagagagagagaggggagagagagaggtgggagagacggtgattcggcttggggttcaccggccgctcaacggtggcaaaggacggatttagcacgctgcctttttgccacaaagacaatgagacatccaaatacgacgctgtttccgtacggccaaagtttacgtttctcaccttcttttttttttcctctaaaataatattatttctcacctatataataagattaggaaaaggaaatttgtctctttttcataaaataaaaaggaaatttgttgattaagagtttcttaaaaaggaaatatattatttctcacctttattgttttttaattcaaccttaatatataatgatgagagtttgttgatatagtcatttattaatgaaagagtttaatg

SEQ ID NO: 29358 - DNA, 472 bp, Arabidopsis thaliana columbia
tgtcacacgttccgtactgttcacctgaaaatgggtttcgttagggttttgtaggttctttaatctaaggttacgattacggaacttatctgcagtaaacatggtttttgttgagaatagttggttttagcttggttttaagtttctagtggaataatcgtcatcaatggagtttgtgctttgttatctgaatcagattgtgagaagagattattcgtgtttgccgataatgtatttatagtctccgattttgtttttgttttggttcaaggttgagaatttctcatcaatcacgatgagtcctggtcagttgccttcagattcgatcaaagtagttcctggcaggagtaagctgagagttgaatcttcaaatccagttgccagagggaatccaacacctagagcttcaaaggtgaagctgctttcgccggaggaagctatgaaacttacatctggaggcaatggagtggcg

SEQ ID NO: 29359 - DNA, 481 bp, Arabidopsis thaliana columbia
ggactgtgtcaaaaccgcaaccctagaaatcactaaaaataataactgcacttccagaaaaactgctctaatattctacgaggagtgtatggttcgatactccaatgtttccttcttcacgctcgtagaactagacgggccttacgtcgctaaatactctctcgccacttttcctacttctctttttagttctttccaacaaacgttatccaataaggtagagcaactaattatcctcatagcatcaaagtcttctttgtctgcttctacgccttattacgtgaaggatatatcacgtgtaaatgaattagagggctcgtatacattagacacggtggttcagtgtagtcctgatcttgatccagcaaattgcggcgtctgtttgagacttgtggtcaaaggtctctcaggctgttgtaccaatgctcgttttgctcagttctatctttctaaatgttttttgaagtatgacacaaccggt

SEQ ID NO: 29360 - DNA, 820 bp, Arabidopsis thaliana columbia
caccttcattctcatctaaaatcggccactgattagctataattcgttccacagtaagtccatcacaagtcgctgccacagctacagcttctgagctcaatgatcgagtactggaagcgatactactcccagaataagcgtaattaccaaatctctgattcaaattagagatttttccataattgaatccaaaatagcttaacgcaggtgttgaactgaaggttcttctagaaaccaaaactgaagaacttgaatctacagccgacagagagttacaagaaattttgattccatggatgatgaatctgcttcgagaccttctgatgattaacgataacatatcgaaattgatcagaagttcagaactttgattttttcgattctttttaatagttagggtttgtggtttatgagaaacgaagtcgtataaatttttcggtttttcgaattcggattaaaattcggctcaatccagcttttggttcggagtcgttcggtttattatagtggtacccaaatggatggtttggtacggtttcgattcgaattcgagtatcagtgtgttttcgatttgattcggattcggtttatccgatataagttacactcaaaccatatatatggtacggtgtttttaattaagtactattttggttcggatcggttcggttagtgtttataaacgtataacttaaaaaggttagagaaagaagacgtacatacaaatgtccctgcttcgaaacttcttctccttcaccttctctgcaaattcaataatcacaaaaccctattttgcaacccaatcaaagccatggaagct

SEQ ID NO: 29361 - DNA, 1469 bp, Arabidopsis thaliana columbia
agaagatgatacggtaaaaaggcatttgaaggtaaaagaagattgaaaaacaattgcaatcaattttgttcaagtcttcctatatcacttacataagaatagagctatatatttacgttacaaagtccacatatgtagacatgactcttttgggtttatgtacatattaaggtgttattacacatcgatcaacatatcacaaaatagactatacattggcttcaccacaaatcggactcgagactaaaaagattcacaaagagatggaaatgaaaacctatgcttcattggcttcagatactgctgcagggaaggcaggcagccagagctctacacgagtaccgccagctcctaaggctgcatcggagctgcgaggtgatataaccctgatcacgcatccgtaactctccaggatctctcgggctacggttaaaccagccacaaagttccatgtcatattgtcttcaaccatgttttccgacaggagttctgctccaaatggtgttagcgaatgatttgcgtctgcattgatgtaacaaatttatgttaaaaagcaatatgattctcatattaaactggttaagccctcagacttaaatacaggaagtaaaaagcagcagaatataagttcggtcttgattaccatatagcgcatatcaggaccatcatcatcaattactacaagactaccgccagcaggagctctggtcgacaaaatttcaactttccccccaacatgagtgcgcaacaatgcaccttcgatgaggttgctcagagcttgcctcaaagctggttcttcaacagcaacttgcagggaagctgagttctcacctagctccactactctttgctgagtaagtgctagtggtctcacagtctcgaccatatctaaaagcacattagaaatgtcgcatggtcttcctgacataaatgaaagagataagccctcccaacactttgtttcaagtgaagagttttgtggcaagacgttaagttaattgctcagaaacttgtaccttatactgtgcatttgtaggggtgccagggcaagaggtggcataggcatttctgaatcatctaatccagaacccaaggaaaggcgtgtacttgagatttgtgagccatcaatggggtccttatgttcatactttgatctccttgtttcattgtgtgttttatttatcttctttagggcttcttcgttgtggcgcactatattagcctgaaaatgaaatgcttgtaagaaatacaaaccgaaaaatcaaattcgagtatggtttgacagatttcccatgcgcaacacatctaaagacagatttataaagacaactgaaaatagagtgatgactctctcaagaaccaaaagggacaaagtaaaagaaggtgtaacctttgtcaagtgaactgcatcctgaagttcttcaagggtatcctttatttgatcaccttgaactattaagtcttccaca

SEQ ID NO: 29362 - DNA, 888 bp, Arabidopsis thaliana columbia
caacctttaaagaaaaaaaagttttgggcggtaagtttagaaaaaaaaactacaacacaattggcatatatgctgacgctttaaaaaaaattaaagctgtaaaattgacttacagcccaaccaatcatgcatttaaaaaaacactatttttttttgctctttgattagtttcaaaatctttaacctccagtataatcgttacgtctctagacatcaaatcttgtctcgcattcgataaataaacataacaataatttatatcaagagtaattcaagtcaataatttatgttgtgaactaagtcaagtatagttcctatcttgtagggagtgtgatcgatctcactacattgcacttatatttctctctctatacattccttataggttttcttagaagcgtcaaaattgagattcgtaggcttttttcatccccaagtgctcgttgtactcggatgcatctcctatgcgtcgccaaaattggacattcgagtggcctgatgttagccatgttagctagttttgtcgtgttcatccttgctggggttttatcttaacaaggaatatggttgaggtgagataccggactacaaagaaccttctaaaagctatgggagtcaatgtcgttctcttaggtttcgttttcttatcaaaccatattgaaaatatgaagctaatgtgtggatacctagttttacaatttttaatgtgttgtgtcattaatttacaagcaaaaaataaagtagttaaaaaaagtgagttacaaaaaattgtgctaaatgtgtgaactgtttattgaaaataatagttaatcctatgcaagaaatttggaatatgtaatatataggatgtataagaaaactagattgactgactttaagttcaatata

SEQ ID NO: 29363 - DNA, 868 bp, Arabidopsis thaliana columbia
aacagagctcaggaatgttccagcgaggtaagatttactttttcaaatagccagatgctcgagaaaaggtaacgagttcaataaaagataagatcactcgttctaggcaaaatgcattaatatagcccttcattttcaccaacaaggtaatctataactgcaagttatcaagtcagggaacacttgcctgaacagcaggagatgcattgccaggtctgccttggggggaagatcgccttgcctctatcaagtaagatttcagtaatgagacaggtgagaactgttctgtgagttcaaacgcaaatgccaagttaaccgcatcaatctgttttccactgttcacgagaacttcaatcacacctggaataaaaggagcagtgcacattaaagataagatcaagggataaggtagagaatctgggtgtaaactaaacaaggaaaaacacagatatccaccatgtttaggcccttgaccagagaccctatcactcactaaatagttactatcaaacatcaactttcctatcgaaatgtcataacctgtaagataatcagccatatactaaaagttaagagaacaaaccaggcattttttcagctaatccaagtgaacggcagagctcagctgcctgacggcgacgtgaaaccatggggatcagctttaagagttcatcttctttaaaatcagcaacaatagcaaaagtggccagcagttgcaggaatgcatgagcctccaaagaattaccattgcaagcatccatgtcaagagattccagcagtggattccatccttctgcaatagttttggctctatgcttaacattttgtgagagaacaacagcaaggcagttgcggtccagaccagata

SEQ ID NO: 29364 - DNA, 509 bp, Arabidopsis thaliana columbia
tgcagtgacccgttcaagtccaaggcgtgatcgagtacgtggagtgggagaaatcaggccatcacttcccaatgacaaaaccggtgaagcccaccttgtcccccatgacaaaaatgtcaacaaatcaatagttctcaccacccacctctcatcacgtttttgccaagggaagagctctcctcacctacctaaggggcgcatctacctcctcctcttcctataaatatcaagctcctcatccaatattaatcacacctcacaacaacatctctctctctctctcatactcgatcgcaagcttctctctctttaagcgctgccttaactcgatcgcaagcctctcgacccttggaagtttacttcactcgatcgcaagctcccgacgcctcgccttctttcactcgatcacaaccccgatgaagctcaaccgcctcaagtctctcacttaatcgatctcaagccatcctcatcaagttcactcgatcgcaaactcccgagacccggttctt

SEQ ID NO: 29365 - DNA, 826 bp, Arabidopsis thaliana columbia
tcgagtaagtgagcgaagaaacaaacgtggagacgttgcgggcttgcgatcgagtgaaagtggtaagaggagggtctcgggagcttgcgatcgagtgaacttgatgaggatggcttgagatcgtctaagtgagatgcttgaggcggttgagcttcacggggttgtgatcgagtgaaagaaggcgaggcgtcgggagcttgcgatctagtgaagtaagcttccaagggtggagagacttgtgatcgagtgaaggcagctcttaaagagatagaagcttgcgatcgagtatgagagagaaggagatgttgttgtgaggtgtgattaacattggatgaggagcttggtatttataggaagaggaggaggtagatacgccccttaggtaggtgaggagagctcttcccttagcaaaaacgtgatgagaggtgggtggtgaagactattgatttgttgacatttttgtcatgggggacaaggtgggcttcaccggttttgtcattggaaagtgatggcctgatttcgcccactccatgtactcgatcacgccttggacttgaacgagtcactgcacgttttcgttccttcgttcagctccgttatcaaaaaatttgaactattatttcccgggaaataaaccactcgatcgcaaagtttgaaaaccgtcttgacttcgtgatcgtgtgacccactattcacctgtaaatcctattccactttaaatcctattcacctgtagttgatttttgcgcttacttcgtgagattaaacaccccatagtgagttagacacaataagatagttgaattatatcaaagatagcatggga

SEQ ID NO: 29366 - DNA, 800 bp, Arabidopsis thaliana columbia
taaaaatggtaaaagaaacagttaaaagcaaaagaataccatgtagacttcaaagtgttcttcaggttaggtgaacaaactaacctgcgcaagaccaggttgaagagcgcattgtatcataaggcgtccaatcacatcatgagctacaactgtttcaatgcgttctccaccaacaagctttaccaatggctcattgtctagatcacacatttcaaccacaacatgtcccttccaaccctcctttactcctgtaagactaagcacaacccttaaggcacgtgcatcgctctgtttatatcatccaaaagtgattaatacttcacaagaaacagtaacaccatagaataagaagtgattgatagcgataaacaaacctgatccgcgttttcatcagatcctagtacaatgatagcacgtgcattcgagactgaaacctgtcagtagatcaaaggttttcagaagcttcaccaccagccaagagttatgcaattaaagctttagaaacttgaccttcttcagatcagctagtataagtggactgccacttctacatataactgatgttcccattaaatcaaattcaaatttagcaatatcagtctccatctcttccttgtctcgttctgctaacacaaccacaacaccgccaccaatacttttatttgctattgccagctgcttcaaaagtgaccctacacacatgatacgttctctgcctctaagctatttataaccaatcaacactgtaaagcaaaaattagtaacatccaatttacactccatcaagaattagtatatga

SEQ ID NO: 29367 - DNA, 637 bp, Arabidopsis thaliana columbia
cagatcagatcaaggtactagaattggtacaatggtagattttgttcataaagttagagttggtacacattaagagcccacttgtctgtagatatggtaaaagattccttggtccgaaagattcgttgattcttgaatctttggtgcttgaagaagtttaattcaagtagctatctttctcctaccaagaacgtggatgtgtctaatcctcttgaataaaacttatatttaaagaaaaataatatcaaaatcatctagaattcatatctcatttccgtgcaaaatgttaattttgggaaaatatctttttcaaaatgggaccttattaatgattgatttattattgtcctttgcctgttaattgtattgtctatggcttgtgttgttgaataaagatcttcgtcttatgtaggtccgaatcatcttcctctactcgtaaccatacgtggattcatataatcttcataatgaaagatttttctgaaaatgcatgaaccgggacaaaattttctatatcataacaaaaaaaagtggtcaaaatgaatagacaatcgtttgaaacttagatattctactatattctacttgaaacatacatatcagtcactttcagcttataattttattttatttttat

SEQ ID NO: 29368 - DNA, 1616 bp, Arabidopsis thaliana columbia
aagaatatcattttttagcgtaattacacaaaaccttgggagctcgtgcggaagaaaattgaggcaaagtttgactgtttatatcctttggttgatggtttttctcagcctcgttgtagaatgcaaaactctttggttcgaaattataatgcctccattccctatacaaaaattcagtaggcaagaattagatttgtgagtgttaaatcgtctagtagaatactcttaccgccacattgagaaacactttctataaccacttcaacataagttacaatagaaagaagcttatatgaatacataattaattctttacgcacctcaagaatgtaactgatgatgacaatatgttgatatcattctcatcaatatcagcattagcttcaccacataaatcagtgatagatccactgcctttagatgactctcagcagaataatcaaacagtgatatattacattcttctccatccattgatctgtccacacttgttcctgggaattagtactgaagcaacaatcagtcagtgtttgatgattgtctaaagcgagaattcaattgtttcattcaacattcaagatatatccacactctttctcgaaaaaccagaaacaagtagcaaacgtttgccgagctagggtttacgagcttagcaacagtaaagttgcataacgaagaatctcgaatcaggaattttgaaaatttgagggaggaaaaaagtcaaaacagagaaaaagagatctagcaaagaagagaaccgaggaacagaatttaccggcgacaggaacgacggttgcggcgaaggcgggtacaaactctttgatatatttttcctcccgtccacagatcgattcgtgcctattgaatttagtatttaccttttcatttttttatataaataatgtgtgattgggctgttattgggcctacatacatacttgtccagaaaagtgctctcgtgacgacattggcatcaaatctagaaatgagattaacacaggcccacaaggatgaggcaaacattcgaatgagcaaaatcaacttcaacagttttcccgtacctaattttgaaacagagtatatatttaatggcttcggatgaaacagagtaaatttaacggcagtgactcgctgtcgccagtctttatagtagtattttcattgttagttagactgagcaacgatgcgatacagaagtgtggatctgttttagagatgatgaggaagctctgtcaagagagttaggtctccgacaaaaataaagaagacactactttgtcattagctactcactcttaacattacagactctttcactcaactaagaagatcatattcactgttacttcagcttgtgtctcaaggaacccagactagcacatccttttattattctttctcccacagttttttttttactaggcacaaaccccaagtccagaacaaaataactcatgtaagccatcagaccatccaggaccaacgtggaagaacagctacgattgtccccaagccctgttaaagagtcatagatcgataatcagaagaattagcgtagaaagaatcatggagagaaatcaagaccatagctggaaaaactctcctacgacactatg

SEQ ID NO: 29369 - DNA, 1446 bp, Arabidopsis thaliana columbia
atcactccatccatattttgagccggtacaacaaaaggcaagacaatatcatcaattttagacccttcgcatgagtcggttcttcatgaggtggaggaaaacgaacacaatcccgagctcatagttacatacacgaagttttttaactgctctgatggcattgtttgactggtcctggttgtttctggaggatctggatatggtctgtccccaggcagctgcactgaaattatgtgagccgctgtaaacccaaccaaacgaagaagatcgtgaacctctcgtggaggtaaagagtctcctagccacctgttcatagtttataaagacattttactacagtggaagagtcgggtttcgccaactcgaaaaatcttttattgtcacagacagagctctcctttgttcttaccttgatatgcattgggtgtccaactctatcttgaggattaggaactgcatcgtgaagcacattgctatgtctccacttttgccaggttttctgcacaagatagtcaaaagacaaagtttgaggttcataatttccagtacattattgaatcagtccaaagcaatccttactttatctttctgaacaaaagctttgggcattatacaagtgtaaaataagcaaatacctcagagaagcaaagcaaacgtcttgaagacaagacaccatgatggccattcttgactctttctatggtagggaagattattttaatggaaggagcttcccgttcttccctgttactccagcatccccactgatcaagaagaacacagaccaaacgtttcatgcaaaaaacttgtagtaacagtttttaagggtgcttcaaaaaaaaatggtacctctggatcagactcctgggagtcaaaatgctgtaacgcttttttacctgcagctgatgaaaaatcagcttgaaatcctgtagttgctgagcctccaatcgaggatgcacctattataagaaaaagaaaaactataaacttaataccctattaaggtgtttgtttaccattatcataggcaatgaacttactgtagacgaaatcagattcctgagattcgggccacttgtaacggcctaacacctttcagaaacccaatacagaagaacacagttagagacagatatactctcgttataactcaagggtctgaaaggatgattctttagttttattaataatcaaacttacctcttgtagcctccaaatgccagtacatctctgaagtgaagcaatcaacgagcacaatgcaacaacatgataaggttgaatcaactttgacatatctgaaatggacactccctgcaaaattcaagagagatttttagatgtatccatactctatttatgcaaagtatctcataagcatatgaagagtaccctgcctgtaatacatgcagcactagttgcaccttctcgttgctcctacaagaagca

SEQ ID NO: 29370 - DNA, 497 bp, Arabidopsis thaliana columbia
gagtaataaactaacaaatgacagtcacaagaaaagacacaggcatttcaaagaactccagtctctagctatttgacatcatagattcagctttcacttaagtttgaagctgctagagatattagccatgtagtaatcaaccatatctaaagaaactatattctcaaaccttttttctaaagaaggccgagtaataaactaacaaacgacagtcacaagacaagacatatagtcacagaactctagctctttcacaatcatagattcagctttcacacttgtttgaatctgttagagatatttgccatgtagtattcaaccatatctaaagacactgattctcaaaccaaactacctactagaaagggaacgatatgttctttcggcagttgattctattgcaaaccaacacaacaaaacaaaaaacgtctttgcatatgaaagaaggtgataaaaattgtctaaaacatacagctggtgatgtaactgaggacaat

SEQ ID NO: 29371 - DNA, 531 bp, Arabidopsis thaliana columbia
gtttctggcaccaaaacagaaaatgccttagatgagtgaaccatggccatacatattcatatcaggatcatcttcatcttcataatctggttctgtagatggtctgcttctctttgcctctcttgctattattgattgtcctctccctttcttcggctttcccctgtaattttatcacattggtcaacaaaccaaaaccatgtatcagagacatacagggcaggtacgaacgaggtaaagtaagctaggtcgggaaactaactgtgtcgacaaaccacccttggatcgccctggccctaattcagctcgtccatctatatcatacagagataaagtgtgtaaaaactgatccaagattcgcaaaagtgaattcagtgctgttgtctgctgcagggcttaccttctcttccaacagcaagttcttcagcctgagtacatttcagggaagatcaacataccagtctaaaaacctttctctctaatgaaggcagagtaataaactaacaaatgacagtcacaagaaaagacaca

SEQ ID NO: 29372 - DNA, 955 bp, Arabidopsis thaliana columbia
cttcttgtttcacttggccaaaaatcgaataggagaaaagaaattcctagatttctaggaagctaggacaattcccacaatggaagaagagcgacttggatggacaagatttagtaggttaatatcgagcaagttaatttgttatcccaaatataattgaatcattaaaataagtaattaaatggaagtcattcaaatataattgaaccattaaaataaggtattgtgcaaatataatcgaggtggaggttttttttttgcacaaaacacattaaatatgctaagtttgaaaattgttatggtataacaattgatttttggttttagtcacaaaaattggtgtagtctaccgttgtcgaccattttttgttattctggtctggtcccgaaggatttgtgttaagttgttgctactcttagctcagattcatacaaagaaaagtataaacccaaactcagagaattacgatcgaaagagagattcaaattgattatcaaagcaataaccaaatcaaatccgaatatcaaacatcgctcgctaaatgtttgctcacgatctacaagtaatcaacatagactactcactggaacatctccaggattattcgctctctctcaacaactcagataaaagatataatgaaagagaaggccaccaacggctatttaagcatcttcagtcgtaacagcaaagcctccctctcgaacagagtctttctcttccttctcttcttcagtaaagactctaatttcttcagtgtctttctcatctgttgactggatccaacgtggcattgaccgcttcatgtagtatgtttgatgaaccgtatcaatttgctacactttcaacttttttatatatataaaaaaagcaagaaaagacgagattacaattcaagacaatagttcaaaattctatttaagtcaaatcaaacaaaaatacacaaaatgtttt

SEQ ID NO: 29373 - DNA, 614 bp, Arabidopsis thaliana columbia
gtgattatgtggttgaatgcattggcctgatcaacaaaattctgccataactccagttcattgtctagtgtctagtacttcccattttgtccacctgattttgattcttttaattagaatttctgagatgaaaccatctcttaaacaatttctacatgaagctttcataagagaagagaaggtctggttgtgcaatggatattttatccatatacagttgtggttattgctgaaatattcaacatgtgtacatgtatatgaaattgatcaaataattgatatctcaaaacaccaacgtgttgttgccctagtggtaaatctcccagatggaggtgttgagtttgatgcacgttcggagggatctcttctccaaaaaaatgaatttttccatatattcaaaaaaaaaaaaattaatatctcaaaaaatgtccagtgtaattgtgacaccgccaaatgtttcaataaatttatttatttattaaatttaaatatgtttacgagacgtaatttcatgtaaattacatccaaacatcaaagactcgaatctaaaaggcaggtgcacgtaaatctcaaatcatagatttaggaggacagtgtttaatacaacgttggta

SEQ ID NO: 29374 - DNA, 575 bp, Arabidopsis thaliana columbia
taacggccgccagtgtgctctaaagaagtcgggcttttctgattatcgccatgatcctgtcgggctcactggcccgtgatccgtgaagaagcaaccgcagccttgcaaccacctacatattcttcaggaaaccgcacccgccaaagaactttagctggcaaggcttcagaaatcgacttcctttatgcgcattttcatcctaatgattcgtaaagatgatgaaacgccaccgctgaaagtcttttttttaatgcgttagatataatcagagaatcgccaaccaaggatattgcgtatgtccttcgccgtacgcagaggctggtgaatggacagcaaagcatcctttgtacgcgattctatctggcagtctcccagcttcgctgatcatctataaatataggactctcgagaaatactcccgtatccagcgcccttccatcttacccgtagcaccaaccaacccatccggccgtagaataaccgccgccccctcctccatatccacaccgagcctaccatgggccaggggtttggctgcatcaaagtacgcatcaccgaggggatcgattccagag

SEQ ID NO: 29375 - DNA, 499 bp, Arabidopsis thaliana columbia
ccagttattttgcatctattttctaatgaaaagctgtctgaattttccgacagaatattagagtttgtttccttgcaatatctcacttgttacttgtcagatgacgaaactataggatttggaggaaataagtcatctcccgagtattgtgataggatatcaaatttgaggatattgaaattttttgttctggtaagcagggtgaaaataggcataccataagatactgcagactgggaaaatggattgatggtgtcttagcttcatctgaaatatgaaatttataatattttaaggggatcagctgacccttcttctctttgtgggtccgcccaattgacatcatctccacaaagtctatatgaccaaagatttgaaaacactttataatcacatattaattaacatgacacaaaaatcccattacatatcctaactaattatggtacagcagtaaatcgcctaccacatcacaccacgtggcagtaatcggtgctgg

SEQ ID NO: 29376 - DNA, 601 bp, Arabidopsis thaliana columbia
ccatcatatatgtttgcagttgtatctagctagaagcttgtgtgcttgagccaagacatgatttgagttagtatatcaaagtacagctataggttgttttcttgacgtgcatgcgatcctaatcattgttttcatttctgtaatgcgtatagaaaaaaaaggttgcatgtccacatgataatgccttgtgagtttttgacaattaggcagttctttccacactcacggtgagtcaaataaaagaaagaagacgtgcacaaatgcttaaggttagagttttctaatttgttttctcaaacaactttccatcttgactcattcaacacttctgtgatgtaacagatgatgtctcttcacacaaagacatttcaagtttagttattattcagcgaagaatgagattttcttttatcccttagcctttgccctatcttgataaggttatggaaattgctggtcccatgacaagtatgtgattggtgtaacacaccatccgtacagtgaagattgcaccatcgatgcaacttgtatctctattattatcactctgtctcacccatttcgatcgatgacacactactcaaaagttatgtggcatata

SEQ ID NO: 29377 - DNA, 1443 bp, Arabidopsis thaliana
cacacaatctcaaccctttaataatctcacattctctcgcttcttcttctcggattcctaaatattatcattcattcatcatcctcccaactcattggctctcttctctcctctcctttgcctattttctaaaatcttctccggccacccaccggccaccttatgatctttttggtggcggcgattacaccatcaatttgttagtttatttatatattaatatgggttgcggtggctcgaggcttggaggtgtggcgacgacaagggcggaagaaggcggggttgtgccacttccagcgggaatacgtccccttctccggcgaaggttagaggagatgaagaaacggagccatgcaggcgtcttgaaagggagccagacgttgtctaagaaagagcttcttaggcataactcttccgaggacggagaagatacggaggagaacgacggtagcttgaaggcgtccgctaaggttgctccggcgcctgatcataatgtagaagagaagaaagaggttatttatgaaaagattccatccaaagatgatgttaaagaggtgaaggaagaagtagttgtgaacaaacaagaagaggacaatcatcatcaagatgttgtggagaaacaagaggaggaaaataaagaggttgtgaagaagcaagaggaggaaaatcatgatgatgatgtggtcgtcatcaatgttaagaaggaaggagatgatggtaagaatcatgatgttgatgaagggagtatcaacaactttgatgagagaatgattggtcctggatctccaagctttagggtttattgcgtcgatgttccttctgatgatgatgatgaaggtaaatcatatgttcttatacaaacacacatatatacatgtataaatcatttactatttgtatttgtatatggatgcatgcattgttagagacatatatatgtttatatatgaaatgcttgttatattatgtagtttcgttattgaaacaatttatccattcactattgcagaaaaagatgtagaagacgcgagaaagtcgatggaaaccgaaagcgtcacgacagagataaaagaggtggtcaatcacattaattcacattattgattatttgatctatgaggatctctaacaatgatatatttgtatttctataggacggaagcattgtcaaaaaggagaaaaaagaaagaagaggaaagaggttcggaatcgcattgccgaggaagtatttagcaaatgtgactgcgccgtgctatgcaggtggaggatgcatgggaaacactcattctcgtttggtgcaagagaaatcgagccagtgatcgatcaaaatatgtttgccatctttgcattgactgatttgttgaagtaagaatggtgtggtgtacgtacgggatcacgatgaataatcaaaaccaccttacgattttagacctttgatttgtt

SEQ ID NO: 29378 - DNA, 549 bp, Arabidopsis thaliana columbia
gtcgactctacgtccgccagtgtgctggcttgcttattagtcgttcttcctaatgttatgtttctctctgtgttctttctttctttggtcaaagctttaattttttttctattgttggatttgagacagtgaacatagctatgttcttgttccaataataaacaatcacgcctgtaaagagcttatgattgattagtgtgttttttagtattaattaatttctctgacaataattacttagtttttaattcttctctgtaagaaacctttggaaactgagcaaagttgcttcttttgagaaccatgcgtttctttctctcttttgttcttgaattcgcaaaaacatgtcctttttcgtctacaggtttctagggtttgtttctgtactataaactatgtttatggtaacattcttaatcataactacactaccaatgcttttatgttatatgtatgcaaaaaaggctctaacttttgttttctttcactattgtttcttcttttgttctctattgttgtagctcagatatgaactgggcactcaacaat

SEQ ID NO: 29379 - DNA, 295 bp, Arabidopsis thaliana columbia
agaatgttaaagaaaaaccctataaaataaatatcccaacgaaggcgataaaacccagattttccagatcttaaattctctcctcccccaattccatcttcgcaaattctccagattcttccgtcaatctttgatgtaatcaattttctcttaaatttcccaacattttttctgggtttatttcataatcaaagcttttgtcttcaatttatttgttatcgagggctaaaaaaactttgatttatgatcgtttctcttgttttgatgaaatgtatttttattttgttaatttcac

SEQ ID NO: 29380 - DNA, 513 bp, Arabidopsis thaliana columbia
tttaaaccaacgttactacttggcaattcaaaatccagagtaaagaatatataaaggcattacttcaaagtataaatccatttaccattagctcagcatgagttctactggcggcaagatcccacaaaacacaaccatgatcttcccatgccgatgacccgtcttgcattcccggcgctggacatgaactaaccgtctcccccacctcataagtggattcatcatgattatctccaatgtccatgctctctggatcaccattggaagtctcaacaaccccatttccagatatagctactacaccttgaaccacattatccgtattcatatgatcattatgtcgttcgtcacttcccgaatcaattggaaggagtttccttatcagtgaaataagatagctaggatcaactgtagtcgaaatgtcaaacaactgcacaacacagaaaataagaaacatcactctctacacaaataaaaatcacaactttaaatccaaaaactactcttaaatag

SEQ ID NO: 29381 - DNA, 723 bp, Arabidopsis thaliana columbia
aatctagcgagccaagaaaccccacacttctataactgaaagaaaaggacatgtaaagttagtgagggccagggacatgtttttctagtgaaaagatttccaagtgttcagtgtttgcttagaagaaaaaagatagatgattaccataaggcgtgactcatgagaagcttgaggccacatataaatattctaccttttttaagaaccacaatatagaagctatatcagtctaatggtcaaggacctctattactcattcacgtgtttggactaatgtgtaagagattttatagttttaattttttttgctgagtctacaaggaatatatgataatgtgaatcaggattatatttggaaaagcagaggtttcaagcttttataagctctggaaatttggtaaagattgtcaatacatcaacgaaacaaagagaaatctatttacagtttcagatacaacaaaacaaaattttcaaattctatagctctaatttgatcaaatctgtttaccaaaaacaaacaaagaacattctaacaagaataaatgatagacgatttattactaaagatttggtaccaaacaaaaaatacaggtacggaactccggaccaatcctagatgtccaaataatccctaaactaacttattatccagaaaaagagccaaaaaattactcgtcaaaactccagagtgacacgtcacccactccgtcaaagtcgttatga

SEQ ID NO: 29382 - DNA, 813 bp, Arabidopsis thaliana columbia
aaccaaacccattcttatcttcactttcacttgatgcctcctcgttgttaaacagagcatgtacacgaagaagcccctgattcgagccttccctgattctcagttttatgatttgcttggcttgcgaattgcagagccaacaagaagacgaagatagagcaggcggattcgggttgaagaaagccttcttcgtctttggtatattgcaaacgtatacggaagtaaagatagcagcatccatggtagagaaacaagatcgcttcaaaaatcccaactttctttttaaaaccaaaaaaaaaatcccaactttattagattcccctgcaaaaattgtctgaatgattttcaataggcttgaacaattggtttttcggtttggttcgagaaatttagccactacgtacactaaaccgaagttaagttggtttggtacggtttactgaaattttggttacattataaaatatactttccgcatttatcttcttcctcttggcatctcctcgacttaaagagagagagagagagagagtggctatacagaagagaatccataaacacaaacttatcttactagttaccactttccaaagaaagttttcaaaaggacataaacatatataatgtcaaacagaaaaatacatgatcatccaacatcacaaagaagaggtaaggacttcaaaacgataacaaactagaacagaggagtctttcttgagatggagatatcttaagtaactcagagcatgcaatcagttcttgctggaagctcctgaagaagttaagtggaactgatgggagcttgtacctgag

SEQ ID NO: 29383 - DNA, 462 bp, Arabidopsis thaliana columbia
aaaatatgcattaattactagtgtaacaaacaaatatagggaaccaacgtcgtggacggcggagaagttataaaccaccgtcggggtcttttgggagatgatgaagtgatccacaacgaacctacaagaaacaacgtggagttcaacatcagaatctacaattacgtctttcaacagtttgttggtgcccccaacaccttgaactttgctccttatccgatgcctccgtctccggcaccggcacctgagagtcctccagtgagtgatgagtatgttctgattgatgttcctgctaggagagctcgtcgtaacaactctacggtgatgacaaactcttggaaggaaaacgcaaccccgaagcggattcgcggttgtggtggattctgcggggggaggattgaagggatgaagaagtgtacgaacatgaattgtaacgcacttaacactcctatgtggcgaaga

SEQ ID NO: 29384 - DNA, 547 bp, Arabidopsis thaliana columbia
taattaaagcgccaagagaaacagagtaacggttctgttttatatgcgagaattctctttttctctttagtaagtttccgtgtagttaaatgcaaatatgtttatgcagcataaattatgcttatacaagttaccaattttcagttgttacatatataaatataaataattagattttaaacaaattttccgtatacaagtaaatattgttaaagataaaaaattatggaagaaggatacataaatacttgaaatattgatcgatacattgatacaaaaaatcataaatatataacttatgcatagagaaaggagacaaattttttgtaatgtggatcaattaagcggtacaaatccagctaaatgctctgcagaacctttttataggaccaccattacctcgagggacgatgtatcgctcgttgttgagaggatcacatataatcttgcaagggttggcacatatggctggagtcgctttctttgatgctttcatgcactggttcacgacacaatttttgacacacacatctatcgagttggaatg

SEQ ID NO: 29385 - DNA, 595 bp, Arabidopsis thaliana columbia
acagaatatcatacaactaatgatcatacaaagataatgaaaaaattacgaagaagaggaagactttagtacctgtgaatgatacttcgagttctctgatggaggagacgctgcaaaattgctaataagggtttctagtttgcttagtgggggtatatatatatatataggatttgtgaatcatggctcgcaaatttcggagatcgccgctgagtagtggagaaatcgaagaaaggaaagtgaattagggttctaagtctcagaaatgcttatatatgttcgggttagttcggatggggttcgattatcgggtaataaccgattgggtacgggtaaccaaagacatgaaatctataaaccgatcgggttattaatagaatccatagcccgtactgaaccccttaattcgggtcgggttcgggttcggggatcgggtatgggtaatgtgcccagtcctattctcaattatagatgtggagaaaccttattggaattatcctcataatatatttttggagtcccagtcaagaatgtcactgatccagaaatttgaatccggcatgcactttttgatctgtatgccactttatatgtg

SEQ ID NO: 29386 - DNA, 901 bp, Arabidopsis thaliana columbia
acacatttccatcaatcaaattgagaattatagagaaaacaagatgcataactggagatgcggagaccagaggaaagcaggaactgtgttcggagaagccaatccgatttcaaagagagaggccacagatagaaacaccaatagcgccaccgcaccaatttgaatcttcttcatcttcgtcgtcgaaacaattctaccggagacaaaaggaaaaaaaatcaatcgaacaattcctcacgcctaacgaaacaatcagcaaattcaaagataatcacaaacctagagagatcgagatcgcttccagaagtcgatgtatcagtagatttttatcgaactttcaaatccagagaaagaagagattcatatctccgatcttcaaatctgggcgacacatatgagtagtcgacatgtaaggaattaacggcgtcgtttttgaaacgaaaatcgctaaccgagataaccggtttcggttatgttcagatattaaccggtctgaagttttgggcttgattaggcttttaaagattttccaatacggcccaaaatttcgtgactccgttaagcgtccgtcactctggacaagaaacggaaacctccttaaatcttataataacttcgtcacgattgaacggaatatttcgtttcctcatttttttattttgttgcctcttctgcaacgcgatcccgccaaagacactctttactttctccctcacgaaaattctcaaatcgtcgttctctcttgattcaccgatttcgttcgccggaaaattgcaatttagcatcagaatcgtcgagccattttgtattatgaaagtccattgaagtaacaagtaacgagagctgcgaggttgagattttacgatgctttgtgtttcgttacgaaatcgaatacataatt

SEQ ID NO: 29387 - DNA, 599 bp, Arabidopsis thaliana columbia
cttgtctaaagactagagctttgtgggttccctagatattatctttaaggtttagatttctttaatcaaagctcgtttaattggattcattggatttttggcgttgctaaagcaagtgccaatggtggaaacgacggttgttggtcggacgctacggagaagacgatgaagagattggtttgtcaacaacaaaattgagggcaaactcgttatttcaaacgtcaaaaagttcccagccttgtaagcacacccaaaatgtgctttctcattattttttggacttaaatatgcctaattgaacaaaagcccaaaaaaaactggtaatatatttttactgtagaagaaaaattaggttgtagataggtcctacagcccaaccaattatcctctttaataatataaagactacaatttttttttcagtcaactataaaattgttgtattttgttttattctatagatagttttgtaaaatctggattgtttgaaaattaacaatttttttgatttgtatgatcttatgtctatttttttgggggaaaatatgatcttatgtttattcaatagaggattgctgaacaagtattttgtattgata

SEQ ID NO: 29388 - DNA, 586 bp, Arabidopsis thaliana columbia
taaaaaagattataagtttaaatcaacccgcagcttggaaatctccaaagtcatcatctggtgcatcttcaacccctccatctttggcttttaggtcttctttcttctcttcttcttcttcttctcgctttgtatctaaatcttgttgttcagacgatctttggaggctgaggcttggcggcagacttgacggggacttctgagcagttgtgacaggggaaagcggtcccggaggtggaggtggcaggatgattgaaggaatggtggtttctattgacttgcctttatcctccaacgagagattgcccagactcttctctaccgtttttgacttgctgtctttatcgcttctctgtttcaatcattttgatgtgaaaaacaaaaagaaaccttgtgggaaatgtatccagacaataactgtaaatcttacatttttgagttggagaacaatggtttctccttcctttaagctgtaatcaacggatgaagtgttctgatagtgttgtccatttcttctgctgtttcttcttgtcaaatacctttagcaaagagagagaaagagagggtggcagatcaacatgattag

SEQ ID NO: 29389 - DNA, 854 bp, Arabidopsis thaliana columbia
ttttatgactactcaacataacaagatcctacattctcttaatctgtaaataagggatttattgtcatttaaataatcagtgaataggattctcaaccactactattaagtacttgagtttttgcttgtcttaaattggtcgcttcttgaatttgatttctcgccatcgttgaaattttataatgtttaggttgctaataaataactaaaagtaaacgaggacaaagtctaaacttgaatcacttttctgtttctccctaacatttagcgtatatgcgtgttctgcatttacatataccatttggccacaaataaaaaggataaatttgacagaaacaaaaagtaaaaaaaaaaatcaattgtgtggtcgatcttgtgctgcacgcattagatttgcaaagctcactgataaaatttgacaacatttactaaaagatctgtgcaaacgttgtttgatcttcttaacactaaaaagtagtatatatgatttataatagtgatacggtacaaaatcatgattcacataacatataaacttagatgtctagcctaaacatgaaaataagagattcgttctttttgttttttaagagattcatttttagtagaaagtatatgatatacagtacttatgtatgtatgactttacgaggattggattccgaagcttctactttaaatatttcgcacaaactcataaaaactttatgccaaagaagcaaaatttcattaaatttgattccttgtagtctccaactttatacaacttttatgagaataaaaaggaacaatttagtcataaatttatatttcaatgggtaaccaaaattgaagaaacggtaagcaaagaaggc

SEQ ID NO: 29390 - DNA, 688 bp, Arabidopsis thaliana columbia
tagtaaacaaacgcaacgaagaaggtgaattttttctgttaaaaaaagatattcaaaagaaggagaagttcatgttatatagagttgaattcaaaaacaaataacggtttctgattaagttttaaccaaatatattgaatttatcaaacatgaaacaacgtattagcaattaacatgcccccaatcataaatctctaacaaatcgcatggacacatagaaaacagaacttttgagggttgtagcgagggtagacctcaatgtccttgtagctgcacatattaggactcaattgcttgcaacttacttggtgaccacactgacaactatcggatcgttgacgattaggcacaagcaaaaggtgtacatcaagtggatcttagtcttactactcttttaatcagataatctgataatgggcttcatatatatatatatgggctcatgaagattccttggttataattttcatttaaaataataaatagataaaaactcatttcaaaaactcttttgccaccataaatgacatccatgtctctagccaacgttccattggctatgccgtctgcttgacacacgaaaattgaattagtaaattgaaagatgaaaatggaaaatgaaaaacaaaattgaatttcatatagcagtgtttaataactatgatagcatttactgcccaattattac

SEQ ID NO: 29391 - DNA, 497 bp, Arabidopsis thaliana columbia
aaacattaaattcgagtcagcaacttgaatttcaaaagtacagcttctcgatcagtctgtctactcgacagggaatgggtaactttttttttaacttacgcaatgcatgttgtgtgtgcagtgtgtataacgctaacttatatcaacaataaaaaaaatccttttttccttttttttcccccccctgaaactgttatgctttcgaaatttcacttatctctctgacgtgtttagtttcatcctaaaagtgtatatatatatagcttaatgtttctatgttttctcttatcttataatatatgtatttcttataatgagcaactcgtgatgatgtatgatatgtctgtttgacagctctgcggtgacgtgttacgtagaagcaattaagcagttggcgtgtgagatcttagacctcacggctgaaggactacggctcccacctcataccttcagcaagttaatcagagccgttgatagcgactcagtctcaggcttaa

SEQ ID NO: 29392 - DNA, 812 bp, Arabidopsis thaliana columbia
caatgatctaatccaaagataacatgtagcatagccttttcattctctggtgtcagatgtcctggccgtggcgaaccttattcagaagaagctatctctgtaatgagacgtaggatcatgcagagagatgttgaggtaaaccgaatgcacatctaagaattaatctcagtttcctattcttttaaatgggtttctcatactctattataatcacacagattgaagttgaaaccgtggatagaaccggtactttcttgggatccatgtgggaatcgaggacaaacgtggctacagttctgcttgaagctggcttagcaaaaatgcagactagctttggtgcagacaggatcgccgaagcacatcttcttgaacaggcagagagatctgctaaaaaccagaaactgaaggtggtcggcaattacatgtttagtgaagaaaattctttctttcaaaacgtaatttgctaaactgttttgatatttttcagatttgggaaaactatgttgaaggagaagaagtctcaaacggaaatactaacaccgtagaaaccaggcaaaaggagaccttaaaggtgaacttatccacatgatccttcacaaacgtcacatcttttttttataaataaaaagcaaaccttcattttcatttcattgcctactattacaggttgttgttacagaagtacttggaggtggtcggttctatgttcaatctgctggagatcagaaaatagcttcgattcagaaccagcttgcatcattgagtattaaagacgctcccattatcggatcctttaatccaaagagaggtga

SEQ ID NO: 29393 - DNA, 479 bp, Arabidopsis thaliana columbia
catcccgggtcacggaattaaccagacaagttgtaatctatattattaaaatttgaaaaacaattttaaaatcaaccattaaactaataatagagaaaatacgttatactcactaaaatcatcgttttaaaatatttcttctttgtaaatgcgataatatccttgattttcgcggatctttatggtttgatgcgggcatcaaagaagggatagtttggtaaaaaaattgttcgtagatttggaccgccaagactactttcttgaactttgctaataagtaacgagaaaataaatttaaaaaagataaatgtaaaacaaaaaaaagaagaacaagttttataacataaaaaaaaaaaaaaaaaagtttaagattcagtgaacctgaactttaacggcttgaaatatgggccggtaagcaccagccgggctaaaaaatgggtcgagcggggaatgttattgtttagttatttttaaaagaa

SEQ ID NO: 29394 - DNA, 526 bp, Arabidopsis thaliana columbia
gtcattaagaaagaaagaaacagaatcaaagataaaagtgaagataccagattaagcaccacacaggggtgtatatagttattaagagaccagggtaagcctaaaatgttaaagtgtcgaatgttttcaaacagaaaagaactaggccacacaaaaacaacataaatcaatgactgaagccgttcatgctaggattagaaacaatgatactatggatacatcatcggtcatcatgtaactcgataggttttggttcctgacaagcaaacatccataccgattgagacaaacaacatacaaatagtattatcaatctcaatctcttcaggtttgatataattagggccacacgcattaccttttgggatgatgatcactccttactctctgctttccccaactccgcctcctctgttggcaacttgcttaacgctttagcaatggctgcagctcgacggcaagaatggctccttttcggcttgaactccattaacatcttggcaatctctctagcctcccagcaaga

SEQ ID NO: 29395 - DNA, 1003 bp, Arabidopsis thaliana columbia
acagtctctgagactccgtttctctcgaacattcaaccttttagcgtcgcccgaatcattagctctactctttacctttctctctatttttcttttctccctatatttataaacacataattaaagagaaattgcttcatataatcaaatattaattatgtcaatgattatatatagtggattatatatgttgcactaaacattgcaacaatttgttaaaacacacaccaaatacaattctaccatgtttgtttgtttttttttgcaaataaaatgatgaatttttgcatacaaatagtcgatcgtatgattactttgataaaaattaaagacaatgataattgcgtatgtattgttttatcaaatagtgttcattctcttattttaatagatggtcaattctctaatatactaacaaatcagaaatactatctatagaaccatctcactgagatctttgtgattaaacaaagtattgattacttttttgggcatgttgtaggtatcgagacaagtttaataattatcgtaaacaagtactagttgttgtattagtagtggttttaggctattagtagaaataattaatgtttaattagatgtactatatataaataaattacggtattatacaatccttcaattgatatggtaactgctttcataagatattgttattaaacgagaaaattaaagcaaaagggacctagagaagagagttggagcatggtgaccaaattgcttctcaccgacctctgcacacttcgtctgtctctgttacatgatacaggtccttcgcattattacaattaattcatggtgtgtctatgaataatttaatacacttacaaatatgaaaataatcatatactagaatatgttatcttatcttaaagtgacatgggcctgtgatacactaaagttgtgtgtgaagagatgtgttatcataaaggaacactgccaaaaaagcatcacactccaagtggggttgagcaaccttgtc

SEQ ID NO: 29396 - DNA, 627 bp, Arabidopsis thaliana columbia
ggtcttgtgtgaccaaagaagtagaccaatgtaaagtccgaagaaacgaaatgtcaaagctaagaaacattcaacttaatgattcgcaatataggaatcatcatgtacaaatcccacgatctctatatgcttcttctataaacaatctttatgagcagtctgttattagaaagaagaagctaatcaatagtttgctaagcatctaaacattcacaagctacaagatcaaagagcagtgtaattaggtaatagaccataagaaacactttctagaacataagtaacagatgtatacagagatcacattcctcaagaccaaactggttccagcattgtgtaaggaaatatatattgcagaaaccaatcatgaatcaacaaaaaaaatgtcgataaggaatcaacaaactcttataaggtttttgttagcacccagaaactctctcttttgttctactcgctcttccaagcgtacagaatcaacgaaaagccaaaactatgagacttggagtttgttgttgtccgtcctgtgagaaagacaagctcttctcagtagattgacaagtcctgaacatgaacacagcgtttcccgttgtaggcacccaaagagccactatgacatccatagac

SEQ ID NO: 29397 - DNA, 881 bp, Arabidopsis thaliana columbia
agagatttgtagattcgagcctaaaagattggatgtttagactgcttattgattttggcagattgttgcttaaagcctgctctgctatgtttcatcaacgagagttgagattaggaagtggtagagttatgagggtctctgtcacgagagtggattgaccttgttttgaatctatcgtctagggtatctgcctttcgcctgttagccacctgataaaccctagagttgcccttatcaatgaatccatccttaggatttctatttttcttagatttatttgtattcacccccttattgcacttttattcacttgttatctgtgcaacctgttgattgcattttagttcttaaatttgtcacttgttggttctactcgatccaatgatcgagtagggttcttaaagttctgatttttgttgtttgaatcctgatttaggattgttactagaaatccaccatcactataacctgacttgacttagttgcttctgtatacatcttgattgctagcaataacagtggagtagattgacaccccctatagctgcatcgacatgttagtgtttaaggagaattgaactgaacctcacttcagcatataactaggcgtaaaaacctacttatcagctatcctctgtatgcgtctctacatcggcgtctcccctacaatttgcgtctacatctgacccatcaccaatctcaacttcctcatcttcttggtgctcaacaagtgcataacctctcttccaatctaactcagagaatacgtaatcactctttaacaagtgcattaagaacatcatcatcttcttcttcattgcattaagaacatcatcatcttcttcttcattcgaatcaccaagaacattgattacccaaga

SEQ ID NO: 29398 - DNA, 1604 bp, Arabidopsis thaliana columbia
ggatccccgttctccacgcgtatgctaccacacacacgtacgtgcacacccacaccacacgtacgtacacaattgtgaacacccgagctatagccacaaaggcttataaccagatcatcactttaatgcatcgtcatgcattactcggcatacgctccgagtcttgtgccatcatgtaagtgaccactcaggatcaagacttactatcacaatcacaacacaaaaagggagacagaagcttactctaaacatgatggtatcgggtaaaccttgaataccacttagacacaataacctcatgcagtactatatataagtagtttaccatgccccaaactagtatagacaatcaagcatcaaatcatgtatcaatatatattcataatatagcaaggatttattcacaacctcatagcatatctcatttaagtataacaatctaacaaggtaagtaagccctcgaatcatatctcaattcatcaagtaaacttatttaagtccatattcatttaatctagtcatgtagcctttcagtcgagtttttaatcagacagcctttcagtctctctctcttgctttcaaaaatgaaactaggcggagagagctctatttctaatccgcccaaggtcggccatgcagcaccgcccgctgccacatgtccggacagctgccgcgcccataggcgacaagtgtctcagacgacagcgtggtgataggtggcgacgggtgtcactccaccgccccatcaacttcggctccaagaattagctgactttggctccaaggttggtaacttgaggtgtcctactcatgtcagtttcgcgaccggcgggacaaacttcgatgcagcacgccgaactttttccatctttgcccattcatagccattcttgccctttgatgttttggcaccgtttggacacacgcggtcaattggctttgcattcgggcaaaagtttctcattcggtcctttggccgtgcccgatgcccttatgcgggtcactacattctcccctccttaatagaatttgccctcaaattctaaccttcggtcatttccaacttccatgaattctcccaacatttttacaagggctttgaatttccttgttctaattatacaattgcctgctcctcgaaccgaacttcctttcttttgcttatttccctgaagtatgcccgatctagacttatcttgagcccaactaagttcaatttcttttctctgattcttcatttggccgaacgttggtgaggcacttccgatggggtttcgaactcatctgatgcttatagaagttatttctcactcatataatggtcggccacacaaaagcaagaaaatacttaacttattatacattcaaaaggttcatacaagttataagtatcgaattttagtcttagtctttatatattattcaacaagttctaagccttagcatatttacaaacaaaatttcgctatgactcagccgattctatacttacgcgaaaagttaactatattcttcctagatgatcttacggaccatctgtcaagggttcctacacttaggacactcacaccttacccataaaaatgagggcatcccttcattca

SEQ ID NO: 29399 - DNA, 1108 bp, Arabidopsis thaliana
ttttgaaagatttccccttatctttaagtcggcgaccgaggatctttgcaataaggagatttcccttatatctcgttctatcttcaggaaaacttctagatttggccatatcctcgaagattctttattatcatctccggattcttcggaaatggtctttgggctccttttggtaaaatttgcaagtctttgcctcgggcaactatgaaacgctaggcatcggctcggtgtacattctatgcaacctaatgtcttccgcgctggccctggacgatccacgagacgcccaatctcggcttgggcgtgtttactggagtaacaaccgagccgcgcgatagttctataccggaatcccgaggtatttcctttcctggctcgaggtgtgtttcttggagtggcacatgagccggataatgaatacccgagtaggtagcatctcgtgaatagttttcctaccgttgaagtagtaagctgagatcccggggcgtatctagtctctcttgctcggctcggtctttttggggaaatccgaccccaacaatcattcccttcttctttttcttcttctttctcttcttcttctttctcttcttcttcgctctcttcttcttcactcttttcttcctcatccttctcagacttttcttcctcattcttgtaagacttctcttcttccactgcctctaaaaccggagttaaggccaggattggttcttcagttcctcctccctcaattgccttattttgctctgatgatgatggctcctccgtcgaggatggctcctccgttgttgcttttattcatctatcaattggcttagttgctactcctctcttcctctttaacccagttttctttttagaggcattatcggaaacacgaaaacaagaaatcgagagatttagagaaggagaaggaggagaagagtaagaagaggcgattagggttgcagttacgcttaaaagaaggagaagaatagattagggttcttcgttgttgagaactgagcgcgagtttgagaaaggagaaagagaggaatcgaacaattcctcgaaaattgaagtcacgaaacttggaatatctgatggggagagatgggttaggtgt

SEQ ID NO: 29400 - DNA, 1355 bp, Arabidopsis thaliana columbia
ctttcacaaaaggaatggaaagttccttctttttgtcggcaaggaaattcgaatttacccatggttacttaatagttaataattaccgtagatgctatgtaggcctgggactaaaatccgttatccgcgggtattcgaatccggatccgtgatccgatccggaaaaccgaataattaggtgcgacggatccggatacgagtccggcggatctggatacgagtccggcggatctggatacgagtccggcggatccggatacggatccagattatgaaaaaaatcagagccgaatatccgcatccgttcaatatgtctacatatttgtattatgggcttaagttatatttgtatcctgggcttaatcaaatacacattatcaatgttaagcccaatagtccaatattagcccactacgacaaaatgatggaatttgagtttgtttgggacttaactattagggtttcataacatattttttctgccgccgtgaatgtttccttcatcaccatttccttcactatctccatctcatctccatgtaatcttcatcaccgtctccccaccatattcatctcggttccaccgtcgtaaatttatggacggaagtttacttacgggaatgatgatacatgggattcaaagtgtcgatggcggagatgaatgaggaggagcagattggacaccgttaaagacgagatcttggtggtatgtgccttgcaaagtctgatgtcgggcacacgtcgatctcttttggtggtgaattcaatctggttggtgaaataggaaattgaatttgttcccaaaaataaacggatctcgaatattaaaaattaatattcaaacttgtttattgttggagattttgtattatacttgtatgatttttgggtttatgatactcaaataaaatcacagctcaaaacgatagatctttgcaaatgggccaaaagatacagaagcccaatgcgattcggtcttcaccaaagctcatctccatacaacggctacctgcaacaagcgacaaatacagaagatcagcagagcaatctgtatcatcagatacggaagtgacgacaaggaaccgttacgacgctctcagattgtgtgatgatagctatgccacgtgattatcaatagacagctaagcaaatcaaggatacattaggttaagaaatagaaactataaaaccaatgtatcgttgtaatcacaaaataggctgaatgaaataaaatcaaaagaaagatttttccatctaagcttcatatcttcatggtatcatagccatggacaaatccatggaagtttactcatgtcctccactaaacatctcaaattgcgttactgtaactctta

SEQ ID NO: 29401 - DNA, 1124 bp, Arabidopsis thaliana columbia
tcgtactattcaagttttctatccctagcctactactatgctgaatggactcttcttcaacacctccaagttcccctacaccaccgttctgttcttgacagccacaaagcccgaaaggaggcttaacagatgtcggttttggctttttggttgcaaccttgagggtgttttctacccgggttttaaacaaactatgttgcccagattgatccagaagaagaacaaccccgagagtcaaccccttcttctcaaagatttgtatcttcttgcaacaaatcgaagcactatcaagaacgcctgacatagttgaccatgatagaaaagagttacaggcgaatgtgagtctgagcacggaacctcgaggttcctcagtagacacttcttgaatcataaacacaggattgtcatctccagcagcttgttctatcaacttgacgtgtagaaatacttctttcatatcgaaatcagcctgactataactgttgaaacaacaaacaccaagcacaaaaccaattaacctaagattgctccatgatttgctaactcacacacacacactatatgtaactgtccataattagaaactcaggtttacctgaatggcaaggaatcgtaatgcttcttgagatttgatacgagcttctccggtaattgactcccaggatacatcttagcaaggttcttcactacagtagcccaaacgagcttccttccgccgccgccgccactgacttccgccttgggcgtcatagctccgccgaaactctgattatcccgagcagaatccagattaagcgtgtttttaagcgacacaatcgcctctgacacgttgcggctgagacgctgaaaccgcttctgcatagccgacgagctctgatcaaaaaccgtcgtggaaccttcaacctccaaactcgtctcaggtagagacgtaattacggactcagacctgtcgtgcgttcgcatgagtacctgatcgaccagatcgttgtcgggatcgccacatctccggcacgactcgaccagcactccaaggctgcagccattgtacgtcgacaatgaacaatgagcacttgagatagatgaaaatggaagttttgtgctttcagatttcagggagttttgga

SEQ ID NO: 29402 - DNA, 843 bp, Arabidopsis thaliana columbia
cagactgagcagcaaggaccactcaaaagtttaagcagtctcaggagagcagagaattaaacttgaaccgatttttgtcaattttgaaccggtttgacgactaaaaaccttgtaataatgtcgaaggatagatgaaataaaatcaccattaataatctcattgaattccattctttcagatattacttgctcatcatcctttactgttttaagctttagtggttaaaaagaatgtgtatatatccatacaaaagttgatatatgtactggaccaatataaacaaacacagctcacagtctcacacaatacataaaaacaaaattcatatttcacaggtgagaaaaactaactagtagtctacttggccgaatttgtcaatgaatttcaataattaggtcgtataaatagcaaacaaaacatggactcttacccaaccaaatatgcataaataatttacattacagtttcatataacatacaaactaatggtgggtcctcgagagagctaacaagagctgtgtgtgggtgaagaaccaacttgtcaacgaaaccaatttaatggaaatcaaccctaaatttaatgaaaccttggacgaaacttacattttgttaaccagtttatccttttaaatcaaacctgcatagattttgatttaagacttgaaagtcttaaatgatatggttggattgaaataatgagtgggccttatagaacagattaaattatgaacaccacaagttcctttttttgtgcgagtattaaaacagttgctaagaaattggtggtgttaataagtggccactattattaacccccaaatttttgaatttatggcagatgg

SEQ ID NO: 29403 - DNA, 1209 bp, Arabidopsis thaliana columbia
acaactactctatcccatcctcagaaatcctaatcactactcagacaacatgcttaaaaacaataacatagaaacgattgaagattgcatactaaaaatattaagggaatgaaacaaagatgaacaagcaaatgaaagcaaaatctgaataacttagaagaaaaatcgaaatacaaagttgtaggaatgaaaagcggctgctgaataatagtgcgaaattcgtgtctctaaaagtgcatgtctcagggcgaaacccttagagacttatttatactaagataagaaagcgggcttcgagcccacttaacggcccatggacagcgtgatcaagagtgtcggctcaaagtgggcttcctgatgggcttcgaatgggcttcgaatgggcttcgaatgggcattctcttctcttctctttctgatgctcaggttgtctggttgagtgcggattcatcagagggtcgagtaggttggttgacggaatggtcttggctgcttcttggactctgtgatctagtaagtgggtcagctgtcaggatggactcgttcttctcctttgtgatcgagtataactggtggactagcaaagtggactgcttggtcgcctctgcgaaagagtagaattgcagaatgcactgcctcctctcctctgtgatcgagtatatctggcaaaatggactgcctggtctcctctacgatcgagtagaagtgtctagatggactgttgagctgactacttccctctctgctactggtgatcgagtatgttggtggaagtgtgactttctgttctgtttttcctctttctgagcaccaatagctccaaagcacctgaaacaactccagaatgcagaatgtatgcaagactagtcctacactcgactaaagacgcaaaatgtacaaaaatgatgatgaatgctatgaaagatggatgaaactagactcaaaatggtgatacatgtcaactcccccaaacttagtctttgcttgcccttaagcaaaaaagtagtcataagcttaatgagaggtttgaaggtggggattcagaaccaaagcattagataaatcagataaaatcaatgtccaatttggcagttctaggatgcgatatgatcgaactctactcaaaaacgttagccatgccttattatagttcaatcccactcttacaatcgacctacacatgctttcaaatctaccaatccctttaac

SEQ ID NO: 29404 - DNA, 771 bp, Arabidopsis thaliana columbia
tccaaaagattgagaagaattacagaatcattgatagacttaggagtttacagaatgcaggtattttcttctacaatttggttctgcccagctgttacctgatttttcatttcaaagtcggttccagtctttagtatgtatggtctgttaggatagattgtgtagttcactgaaggtgaaataagcaacacattaacttcactgttagcaagtgaaattttctgcataagctagctctttgtttctgaatgccatgagtttaagcagtagtctaaagcagcttgttattggtttctatgcaggatggatatctatggaagatgagcaacttcaatatttgtccatgatcatgttgcattcggcagacactttctctatgaaggagtcaccgcttcttctaactgatggtagaaacgccgaagagcttatggatgaaaatgctgtagttatgcaatccaagatcagtcaaataaaagacatattccctgagtatgggaacggtttcttagctgcgtgtcttgaagcctataaccagaatccagaagaagttatacagaggattcttgaaggaacactccatgaggatttgcagcgattggacacttcactggagacgatgccacaacctaaatctgctccaactcttagaagcaaagacaaagggaaaggaaagctcattgaatctgacactagtactctgctagtgccatctatacagagaaaccgatcacacggccctcccttccagcttcatcagcctcatcagcaaca

SEQ ID NO: 29405 - DNA, 941 bp, Arabidopsis thaliana columbia
catcacagcagttttgtggcgtaggaaaagaagcagaaagaggtgtagagacgacggagttcgatagttttttcagagagatgcctccggtcggcgaattgtataatctttggtcagaccattgactagactaataattcgttcttttttttcccacaatattaaggcccattgggtttaatattattatctcaagcctatgtgaaacacgaatgttccttagaaggtgaacttctttttttttgcttaatgcattaatgtattatactagattttaacctgcggtataccgcggagacaatttatttccttaaagttagtatatataaaagtttacaaattttatctatctataaaatatttttattttatagtttacaattgttattaagtagcttcctgccaaacccgtcccgccaacccgtctcgtaaaaaaaactatttattttattaatgttgatcttatttatgatatgtttatgaatcattgtctaaatattttgtaattttgtagtaattaattgctatcaaatatctttacggtttgctgcttataatcgaattgttatagtcataaaaaaagcaatatcaaaaatgataattttgtagtatttaaatgatattaaatattttggaaattttattttagtaattaatggtatagttaatgcagagagattttagaaaggtagttaaatgcaaacatttaattcgaagatttactttctaattatcaaaaacaattattaaatgccagtggtagccactgtaaataagtctcaacttgaaaatttatttcacaaagtggctgccaaaatgtatatgtagattatctttcacttttttaaaaaagacaatcaataaaatcattagtagcatagtttgtttatttgttttgaaagttttttttcgcccgttatattattttttgaaataaatat

SEQ ID NO: 29406 - DNA, 665 bp, Arabidopsis thaliana columbia
tatatttttaaaatatgtggaacttggaaaaatcctccaaggatgaaatctagtcttgtgagtatcgccgtacggaactctcaagggattttcagctcttcctccgaggaacttgatgatttctacggacgagaagaaaccgcaaattacatggggccaatgaggagccacccgagagtctcccaaaaccggagctttaggaaccgagggaaaatctcaaaccaaggtaatattcaacaaaggtctattcttagcgagtttcaggaacctcagtgagaattgcctattccaacaccggcaaatgagaactcgaccctagaggttttgatcaagagactcgaagctagttttcaagaatgccaaaaaagtgtcgacgcctcaatccagatcatgcatgaggacttaaaaagcaaaattaattccctttagaggaagttcgaatacttgtcttaataggaaaatgagactacctgcctgattgagtcatacgagaaatccttcagaacagaagaagggcacccactgatcggtgcaccattgcaagccatacactgaggagtgggatggcttacagcaccagagtaccgaaagatcaggaggaggaagaaaaacaatccaagcaagcctgtgagacctgcacgatctgaatagtggaagagaccaga

SEQ ID NO: 29407 - DNA, 1396 bp, Arabidopsis thaliana columbia
cgtacttatccccaaaattagaacttgacatatgtgatagcttagttattagtatcagcttgagatgtaataatgttgcattagttggtgctttgaatcaagaagtttgatttgttactcagtcgttgtatggttgctgatgtctttatggatcgaattatatcagagggcttctgcagcaagcgaaatgggacaaagaaataggaatgttgatttagaaatggagcagcagcaatctcaagcttctctccaagcagagccttgcatccttttaggcagctttccgcaacaaccggataataataatatgcctgctatggttgcacacgttcctaatttagaacctcattctcttcaagacccaacttatgacaactcggccatgttctacgggcttcctcagtatcatcatcatcctcaccagcgtgttccaacgaatttctatgttccctatgtggcatttcaggctcctccgggtcagttaccatcttcaagcagtcacggtgtagttggtgtaagtcctgatcatgaatacgaaagaaatgctcattttatggatcacacaagagggacatacaagcgaaagaacgctgaaggaatacccggaataacctcaatatttaagtaccttagcagctccatttaacacaccggagacaatagccccttttggaggcgctaggaacagaccaggagctgttacagtgaacactgttcttccttctcatgctccaaacaacttcattcaaggaaactatgcaggtcatcatccttttccacctcctggctcaatgtggtatgatcaacaccacggcagatctgatggctcaccttcgttctggcccacaccttacatgcacggtacatactaacacacaatcgctttttaaagttttgaaccttgtaatcttatttatctatctttgaatgacctttcaggtagtaacattttcgctgcccccatagagtctagtagcagaaaccctacatcatttatgtatccttctcagttaaacccgagggaccactattatagtcatcatcaccacccggcacctcctcctgtacaaggcatgagaggccagaatgccacattatatccccacacagcttcttctgcttcatacagagttcctccagggagttttactcctcagaacacaatgaatagtggtcccttggggtcagagatgggctcgagtcacatgggtccggttcaaccaaccgggtttcggatataccagcatcatcagcgagatgattctgtacctgtagcaactcttagacaacaccgtggaggagttcctcggcttagagtgatgcctgatgatgtaactttctttcctcagattttctgctccatctgttttcatttttgtcgttgctcaaggttttg

SEQ ID NO: 29408 - DNA, 1199 bp, Arabidopsis thaliana columbia
tttccctctttcttgctacatagaggctttagcaccatgtggtcaacagaaaccgaggcatcacatggcaggttgatatcaaggtctcgctttaccaagtgatttacttccttgtgttgattagcaatccataaggaatgagggataaggggcgtacgctcctgcttgcaaacaaattgcttcccaaagattgggctcccaataattttagtactactctgagagttgttcgtttcaactcttcccatgtttgcattattagagtatgaagcagatcgcaaacccttcagaacagaagcacaagtcaagtcgtccccagcgtcagttccatccatgaattgatttgtcgaagcattcagatcaaagaagccattggacattccacttctgtaagggggctgaggttttagccagggcaacccagctgagcattcctgcctttttggcccttgaagatttacaaaactgtggctgttcgctacctcgcctatggaagcatttggtttaaagccggttgatgggaaattatagaaagactgctttgaccctgaagagaatccttgataaagcccattagagacatggcttctattctcaaaactcaaatctggtcttgcatgtgtgtcaaaattcatgtagggattcgtttgaactggataagatttctgatttgagctggtcatagtcctcccggatgaagaccaatgggtcaatggtttgaaaaattcagggcggtagtcattgactgatcttggagcagtagatgccacacttgattcaacgtagctatcataagaaacttgaggagtctttgagcgaacttctagctcacgatgtgctctttccccggaaaatttgaccttgctgtgatcagttgtaggatagctctgaggttgaaatgcattgttagaaagtacttgtcctgaatgagaaggcagatgcacctgatctctctgagtgctcctatcttgccctattaacacagccacaaaaaaaacatttgagaaatagaagataggcagaaatggtaacatattactgaatcagcacaaaattcaaaaccattctatgagcgatcacatattttgcgttcattaaatatactgagcaggaaagacagttaaatgtacgagcatgtaactagccactcattaaggagaaaaaatcacctgcttcaaggaccatccatccattttgag

SEQ ID NO: 29409 - DNA, 1003 bp, Arabidopsis thaliana columbia
  unsure (1)..(1003): unsure at all n locations
ctattgattcattttaagcactttcctgataaagaatctgttttatccggttgactgctcttatctctctgtcactgctcacaccttacactatactcccaatgtctctctgccacaggttaatctaaagacgtgaccgaaagacgaaaacttttacgttttgcatggagtaagactgccagacttaagacgtggagcaaggagatcgagacgccttgacgagcagcctaaccctccgctagttgaacaagcagaacatatcgtacttcctcctcagactgcaacaaggagaagaggtggtggtagaggaagggggaatgctgctttagctaaaggtgcggcacctccaagaccaactgctgccggtagggcaggggtatcaggttgacagacttagagccagaaccttgtgaggttcgtccagctgcaggtgctataggggccactgaacatgccttacatcgagttgaaggggtagctgataaggatattcctgnggaacgcggtacggcagagaaagtagtaggcatggaagaagattccagcatgggtccagtccctgagagggtaatttctgttaaccttatgaaattagtcaccggattttgtgcatggttatatccatgcaaaactctagatttaggttaaagaaggtgctccgttttggagttcaacatattcttttaacatcatcttggaacagtcatttgttgaaatgtggtttgcgaggccatgccaatgggtttaagccttgcactagctttttgttctcctttgagagagatattcactatgatctcgttttctgtataggtacaagttggaaattctcctgtttataagacggagaggaaacttggtaaaggtggctttggtcaagtttatgttggcagaagggtgagtggtggcagtgataggattggagcagatgcaattgaggtattagaaactaaaaagcttggcaaaaatcatgggggttagttcaggggatcgttcgacctgc

SEQ ID NO: 29410 - DNA, 859 bp, Arabidopsis thaliana columbia
tcaaatttcaggcccacctagtaagaaaagtaattaatttgttaacgattagacttctttcgtctgtatccctcaaaaatctcaagtatgcttctttacaatatacctcaattgcatcggccccaatcctatcgctgccaccactcacccttctaccaacaaaaacttgaccaaagcctcctttaccgagtttcctctcagtcttatatacaggagaatttccaacttgtacctatacaagtaaaatgaaatcaatatcagcatctctctcaaatgaaaaaaaaaacttgtgattgaatgtcattagcataaattttaccctttcagggactggagctgtgctagaatcttcttccacaccaactaccttctctgcgctaccaccttccatagcaatatccttttcagctaccgcttcaacttgattaaaagcaggttcacctactgctggacgaacttcacaaggttctgcctctaaatctattaatctgatgcctcgacccctaccgacaccaccagctggtcttggaggtgcagcacctttggcgtttccccttccgtctgcaagcaccgcctcttctcctatgttacaggctgaggaggaagttcaatattatccgcctgaccagtcacctgagggctaggttgtctcaatctacgtgctccacttcttaactctggcattcttactccatacaaagagtaagaaagtattttgctttcagtaaacctctttaactaacctgcagtataaagagaggtagcagagagtacgtatttagttgatatataggtgaaccctaccaatttcatttgcatttccttcacaatccaaaagataagacccaatgcgttgtgt

SEQ ID NO: 29411 - DNA, 588 bp, Arabidopsis thaliana columbia
gcagctccttcttgttatagaaaaatgattgattgttaaagtggagctttccattatgatcttataccatgttggtgttgcctgatatcttaaaatactataagcattcctcaaagtagcttttaggtttgacttctacccacatacttaggtggattagtttgaccttgttatgtgttgggtccattactctttccaaacacactgagttcatttctttatcattgcgacgaagaatcccttatttattcttaaccaaataactcactgtgggtcaaatggggctattgatggtgttagtctaccaagttggtgagtgagtgaatagatatgtaaccgattaggtcagactgagatcacattctgtagtcttagtactgcttcttcatgcaccttggtcttggtgcccaaagcttcattgaaaccatttctttccagaccttagttactagttctactctgtgattgtgatttgaatatgcagaggaaatttctgaaaagcttcttggcagatgacaatttcgattgtcagtcttggctgtgagtattcaaagaagtagagatcagataattctgatgacgtatgat

SEQ ID NO: 29412 - DNA, 514 bp, Arabidopsis thaliana columbia
gtcttccaggtaagaacattcagcgaccttttatgaaatatataaactccaaaaaaggagaatcgataaatttaagaaggaaaatgaaatattttcgataaaaatcttaatcgatgtataaaaatataatttaaaatatgaacataaatttgataaatacttatatataatgcatcaagaaccgtccataaatatagtatatcattaaacacacgatgaatcatatacagaaaagatattcgaaagaggataaggccgaaatgacgatgtaaaataaatagaactactaataaaaagaagaaggatcggctgaaaagaagaagaatcggacttgtcttcgaagtcagtgtgtaccgactatatataaagagctctcatagaatgcacagcgattggcgtacgtactcctcgaagaatgaaaagcaaaatacaacgagtcccacaaccgtgaagttttccataagaagaattagattatgatacttatataaaaatatttcattgtttgcaatta

SEQ ID NO: 29413 - DNA, 471 bp, Arabidopsis thaliana columbia
ggatacaatgtttagcaaagactcatttacaacttacgatattgatatccacagaagggaattcttgaggtttatcctgttgtatgcaaaaagatggaagtggagttataactaaatacagttatgaaacaagtagtaggatataagatcaagaaggtcagtatttacgacttgagcagatagagggggttcagacgcttcaggaaccacatcaggtgagacctagagaaggatcagagtgggatgttcaatatcagtttgcgtatatagtttgatgtaccagaggcgatgtatatgtgatgtgctaccttaggaggttggtgagtagaagttggcacgtcatgtccatgttcttcaggctgtcgtatatgatcgaatggggtgagacacatatgtgcacttgtgagacgttgaagcctagtcgagaagtagtccaatttgggggattgttccttaagatttccgatggaa

SEQ ID NO: 29414 - DNA, 715 bp, Arabidopsis thaliana columbia
taaggacgtaagtactcaatctcacatacaaaaacactaaaaaaaaagacaaaaaaaaaaaaataaagaaagaggtttcaataatggcgtgaaaaccgagtggacggcttcggataatctgcaaataagaacggtgaacgacgatggtggtgcttcaatggacccggcacaaaccgagaaactttaacgggttctttagatgtcgaactagagacaacattttgatcctaagccacagaaaaacaaaaagaagccttagttttgagaaggtgataaacagataccgcaaatacgaagaacatgaaagtaaatgaaaagttgatgaattgaaatgtggatccagaaccttgacgagtgaaaaccgagacgctgtaatgtggacattgtcgaggtgacgagaatcagaatgatgcaagaagagaaacaagagaaggatcattgaagcaacatggattgagctcattggtcacaacagaagcagtcatacaaggctcaacgactaagaggattatgaaccgttaaaagacttaataggtagtaggagactatataataagagcaagttcacgcataagtatttgaatgtaagaattaaatcacagaataaacaagttttttatttaatcaatccagatgaatgtgctggaaaagctcatgggaaaagccaaacatgagtcaaaaagagagaaagaaacaacaaaaggaaaaggacata

SEQ ID NO: 29415 - DNA, 778 bp, Arabidopsis thaliana columbia
gagacttctatacaaaacattataaactgtttctactctctcccaaaccaaaagatgggaagaagaagagactacttctctatgatgcaagtgggtaatttacattatgatataccttcttctctttgtgttcatcaaaagaggcaaaaagacctgcatgaattttatcctatccaccaacttcttccctattgatctccctctggccttaccaaatctgcaaactccacaatctgtagagtttgttatgttatactctcagccaaatccaaagaccaccagcagcttcaagatgttaatgccaaaaagagacccgactctgaaggtggaggacacaaaccagtttgggttcctgtacagggttgttgtcggtaagggccagcgttaagctttgcaggatctacagctactcaaggttctaggttcatctgtcatgcctctcattccacttttgtatcaggaggcttggaagatgataattcttgtgcttcttctaaatgaggctgctcctcagaagcaaggtgtttctgattttgtacagtcggcttctctggcaatttcggtctcttttcttctgaaggtagagactgttgttgtctctgtgtaacgcccttgatcccgtgcttttgagctagtccttggttcggtgttgatactggatcattcctgctgaatctgtattggaattgtttactactttcgaagcagtgctttgcacagaagcaacacaagatggaggttcaaagcaggcacgcagtagaactactgcttttatgtt

SEQ ID NO: 29416 - DNA, 340 bp, Arabidopsis thaliana columbia
ttcaaactattttaggaaatgattaacagtactgaattttcctattgttggttctgtaaatattttcaaaatatatttacattaacaatctattaatttctaagaaaataaagtaatattttgaaatgaataactcatttttagttataaaaatatttattttaaaaaatcaacaaaatcatgagttattattacttacttattggattatcttttcttctataaaatacaaataaatagtcattttctataaaactagacacgtaaaccaaaatggatttattagtttgattatggaagttcaaaaacattgtgtattttatgatttacaaactagtta

SEQ ID NO: 29417 - DNA, 629 bp, Arabidopsis thaliana columbia
atgaagaataaaccctacaagagattagtaagtgtaaaaattaccagaatcagaagaagaaggtggattagaatcaatcggctgggtctcttcatacggagaaaagttttggttagatttagccatggcaattcatccactgacaaactccgacaacgatagtccaattcgccgggtttgatttctctagaggcgatttcaatgtagatccaaaagtgaagaagaagaagaagaagaagaagaagaaagccgacacggggaattttaggcgcgcaaaagacagtaaagtggtctcgttagggtgcgcggggagcgtgaactacctaatatctggagggaaataaacaatagataatatataaagttactgttgtaacaatttaacaaaaagggcatttggtctagtggtatgattctcgcttagggtgcgagaggtcccgagttcaattctcggaatgcccccattcttttttaagtctcaggggcattcaggagacctacaacctcacacatctaagtaatacaggatgtggagagcatagagcatatcaggactctatgataagcaagaccatggtgacactcttacggtcactagtttaggcattttaacaaggaaaaatcaaatt

SEQ ID NO: 29418 - DNA, 308 bp, Arabidopsis thaliana columbia
caattaaaacgttactttccatttttcccatatttccacccttatttattttcattggtttgtaaatagagtggctctcacttcttttattttatttttatttcgttcatataaaaataaaataaaactgttaaaactaaatttaaaatataggacaactttcagtaacatgatgacaatttgcatttccaatttattccgggacaaatgttttgttagattgattgatattactgactccaagtccacgaatctctcatcttgcacgtgacatatgggacaaaggtaaaacatgacacaagccttca

SEQ ID NO: 29419 - DNA, 1025 bp, Arabidopsis thaliana
acgatatgctgcacgagaccgctatgtggaacacgaacgactacatagatgctcgatacgacgagtgcatgcacgctctggtgctagagaccggtttgacagcagagaagcctacataccccgtgatcgctacgacagtgacaggttagactcaagtttctaatgcaactcagattttttgtagggcaatcaaagtgccttgcatctcttacatacactatattctcatctgtgattttacaggtatgcagccacggctgctcggtatgcaggtggtgatagatacagccgtggatcagaccgttatcctccagggagctatgacaaagctcggtcctttgagagagacatagccccgagtgcaggcagtgacaggtacggtggtggtagagctggtggtcccatccgtggaggaggagaggagggaagagggtttagaagcagagccggtgctccttatgagagaccgagcagaagtggtggtggtggagcttatccgtcgtcgtccacttttgaccgttattaagacacattaatgaaagaaagtgagaatgatgcttggttagagctctatacactcagtcgtgtgtgttgcttgtggtaatgaatatctctgtaagcgttataggtgtaaaagacttgtcttttttatttatatatgattagtttgcggacctgtttagctttgtattttgatcctttattatttttggtttgttttggaccataacatgacttttgagcttcgtcagtcaatgttaaaccttgcacacataactagcctttttagtttcatcatcaatgtacaagagacgagtgtcttaggcatccgcatgttattctaaaattttgatttattgttttgtatactgtacatattgcttcatattgtcaaaattttcgttttttcctataagttcaatctattaccaaataggcaaataaaacgaagcagaatattattgtagagacaaaagaaaagttgagaaattaattaaaacaataaagagtccaaatcgattgga

SEQ ID NO: 29420 - DNA, 208 bp, Arabidopsis thaliana columbia
catgtgtttcacgaccatagaacaagacggtacattatactatatgaatgttggcaaaagacaagtttttatgtttagttacgtttctctgcaaacgaagatattttttagtttgatcggttttctacaaaccggttccaaatcaatatgatcccattttggttttctcttcagaatgttctagaatcagatgagtgggacttgttga

SEQ ID NO: 29421 - DNA, 475 bp, Arabidopsis thaliana columbia
gagggggtacgatccccatcaaaagtgcgggagaagatatatttagctctccgcagctccttggttcctggtcgtgggtttcttcggtcatcagatgtgcatacaacattgcatttccccatgatggtctcctggaccaacaacacaggaaacccaaactcatattacatctatagtaaacatatcatcaattcagattactatttcgattcagtaagcaggagagaaggagatgaaaagccagcaaacttaccacatcattgatattggaaacccctttttcatcaccacaagccagaaacaactcatcccattgtggctcatactctcccaagaagcgctggatgtcgataggtcgaaaaaccaaatgaccttgactttcttctcacctgttgatgtctggtaaatgtgacaagcttcccgattgaagtctcagattgaccatgtacgtaaaagtaagcacagtcaaaaagcc

SEQ ID NO: 29422 - DNA, 563 bp, Arabidopsis thaliana columbia
tccctgttgattcaagatatttaagatttttaaaaaacaaactgaaaatccatattaaaatttatttagtatccaaagtaaatttgaataaagatgtaaaatcaccctagtttttaaaaaataaaaataaaaacgaaaatggagaaaaggaaaaacatagtagtttggtcggaaaataataaggaggttcattaatatgtaaatcacttttcttttcttttttgtgaaaaaatgaatgtagtaaaacttaaaaagtgaaaaaaccccaaatgttatcaaatgtgacaaatgggtttgaattgtaatcaaatgttacaaatgggtttgaattgtaaacaaaagttatcaaatgttatatattgggtttgaattgtagtcaaatatcacaaatttatatagttcgaatctggaagtataacgttaaacggaaataaaagattaactagttaatccaaaaccttggagggatgagatcgaaggttttcttgttattgttccactataaaatccatagtctttggcaaaaatggaacacgagtctttgcagtgatctttgtctgatg

SEQ ID NO: 29423 - DNA, 460 bp, Arabidopsis thaliana columbia
tgtgacatatgtgaagtccggattttggattcttttaagcgttatgtgatttatttaagcaataaactatggtttacaaacttgacatgtacacaaaaataaaagaaacttgacatgtctctttttttcttttttcttttagttagtgtgcttttaagaagatgtctatatgtgatatcttatttatttttatcatcccccctcacgtgacactcaaattagcaattcacacttcgtaccaaacataccgagaacaagatacttgcctcgggctcggctctcacaccagtcaactagaagactttccattttcatcattttaatactaactgtccttttattaacttaattactttcttgccaaaaactttatcaacaaaattatcagctctgtactaatataattaacgagacaactgtttgaaattgtctatctattaagagtatttacattagtaga

SEQ ID NO: 29424 - DNA, 472 bp, Arabidopsis thaliana columbia
ccaccggaaattccctctgcccctaccgtactcaagcttggtagtttccaccgcctgtccagggttgagccctgggatttgacggcggacttaaaaagccacctacagacgctttacgcgcaagcaatccagattgctctagtactggatccgtaaaaatcgatgtgtttaagagtataagagacaaccacatgttctgggatgttaaaatacataaacacgagaagaggaatactccacagctgttactgcagtgataagtgaaagagtttacctatcatagagttaggacttgggatcatatattttgctgtgaatacagggaaaaacagctatttacctctctctatggctactattaacctgaggaaatgatgcatattttgaggctctaggtggttcgttgtctaacatgtcggctggtggtatcgccccgccgtcagaaagttgggccacacgctctgagactttg

SEQ ID NO: 29425 - DNA, 995 bp, Arabidopsis thaliana columbia
cgtgaatgtggcggtgtaataaaatataccgaaaaaaccacaaaaaaaattccaattatagacaaaatcaaaccttttttttttctttaattcaattccaaaatgggctttgttggctaatgggccaagagaattacatagatacaaaataaaagacacccaaatctaaaccctagaaaaacaagatttgaagaaggcaataaggactgttcctttgcagacaagatattgacaacaaacctttgattggagctagcaaatcctgctgcaaaccaatccgagaaacaagtcaaacccaaaacattcttttcgggaaagagagcaccgccacaaccgtctcacacgattcgcgacgatatgatagataccttcagcaatcgagaaattgacactggcatacctcaagtgcccgacgcactcggcttacctcgctaaacccagcagcaatctgacccgagcaggatccctcgcgccgaatcttgttcacaccagacaaaggagtagaaacggatcatgttcaggttgcatgacctcctgccgcgcctaccgccctcgcagtagctacaattgacgaagcaaccgtcgcatcagaagcagctaaaggtgctgcacaaagacataccacaacaacagatcgaggcacccacttagacgacctcattcaaaccatccttgatctgctcaacggccaagaatcacgaacaaccgaaggatttgatgcccttttcatagaacaagtcccttcccagagtaagatcgagcgacttcaacgccgaaaacgcacctccaaaccttatgacgatcaagatggacaacagtctctgcgaattacagtcgcagaacgctcaaagacccagtgtcgcggaccagcgtctgttattgtaggattcatcgacgagcattcttgtagtagcccacaaaatgaccacaaccttcagaacgacctcaacctgcagagtggccatacctgtagaacaacacaacttgcagagtgg

SEQ ID NO: 29426 - DNA, 851 bp, Arabidopsis thaliana columbia
agagataccctcatgccgagatcgggaagatattagacggatgtgaaatatctgaggcacagaaactgtcttaaaacggattttggtcgacttctactactgtttgcatgataactcataattcttccttgaagctcggatgtttgaaatatgccttgaagtatcctttagctcttgatttcgccatgaaaaagctagtgaggatatggtaaaagtgggcgaaaatacgatgttatgaactcccccagacttagactttgctggtccacaagcaaacaacagagccaagctggtggagagatttgaaaaagccgaaactctcctactatcagagaccatgtcctaaaagatatcttgcagatgcatagagacaaagacatcacgttaaaacattctcactatagactcaaaacgttcgcaatccttatccatccgtctcagaccaacaagagaactcaagaatcttgtcagttaaccctctacatttattaaaagttggcgtgagctttctcactagagggtgtcattcggggtagatgacgcttggtatgaaaggggtttttggtgtttaagtggtggagttaaagtgtttaggattaccgtatagtctcgaatgcaggagatgttgcaaaccgcaagagcgaacggatcggttgaggtccacaatttccaaccacttcttctttttgaacaacttcttctcctttacttctttcttactttcggttccccgagacttaggtttttccgagggggctctcttctctaattggctcatctctcccttaggtttccatttctttccatggaaccatgttactagactctcttggttgtaatgtttcctttcc

SEQ ID NO: 29427 - DNA, 1095 bp, Arabidopsis thaliana columbia
aaaacatatcggagaagaagagaatcgaagaaaagaattagggttagggtttgatgcggtaggtttgagtttcgctcaaactaggttatcgtgtatatataagaatttatttcctcgcaaatcactcgcaagccttgctaggaaattgagaggcaccgtcttttaaaccaatcaaaacgcagcatatattgcgagggaactgcgagagcgcctagcaaatccctcgcagtgtttaaaccaattaaatcatatctgattcaataatcagatttgattcagtttctcctatttctagtaagaccctcaacaaaataagaacatgactaaaaattctaaatattttagggtttagggtaaaaattgcgagggaagtgctacgcacactagcaaacacctcgcaaagtcctcgcaatgtagaatcaatttcgaaaaatacaacaatcactactcaaattcatttggattcatttttttgattcattagaatgttaattatctacatttgaacctattttatcatcatatacttcgaatgtgttttttccccaaaacatcaatgatgatcttatgattttctttaagtatgaatcatgaatgtttaacattttcaaaatgaaatgttaatattgaaacacataaaatattcttctgtgcaaaccatataatcaacttgtatgaatgagaatcaaagatcgcaaaacacttttatgtatttcagggtttaggctaaagatttgcgacgtatctgtttgggatttgcgacggataatatctttcttgcgaaaccatcgtacttccctcgcaaatttgcgaggaagccttccctcgcaagttttgcgacggaattgctacgcgcgtccgatgtgtagcacgttactcgcaataccctcgcaaaaactgcgaggaatgccttccctcgcaacgcttcctcgcatattgactgttttcttgtagggataggattaatctgtatttgttggaggtggaggacatagttgcaaacaatggaagagttaaagttttttttgcacaaaaccctaataaaaacttaggtagctaagtaatttactatatctagtactaaattaggatcac

SEQ ID NO: 29428 - DNA, 563 bp, Arabidopsis thaliana columbia
ttttttaatgcaaaatttgtaccatctttttttttgtattggttagagctataaaaaataaaatatggatactatattgtgttgcaatttttttaaaaatatgtgtgaatagtgtaaacacctaacattatgaagttcaaggaatataaattaagagatcgatatattatattaatgttggttatcaaacttcacattcataaaaaagttgttatgcataacaataaccatgatactatttgttatttttagtcaatgaataattttagtcttatgtaaagttataaagtttgataattgcatttaatgaattatctttatctttattcaactttaaccaataataaattaattacattttaccaaatcaatataaatagatgagatttattaaaaaaagaaaactaggtaagaaagtaaactaatcctgacgcgtcggtcgagagggaaggtaatcatcgccgtggaatatagacgtcacgtcaatagtgtacccggagcacagaggatcgtgccttctctccctctctgattaaaggtatagagagccccgattgaaaaga

SEQ ID NO: 29429 - DNA, 1122 bp, Arabidopsis thaliana columbia
gatcccccaataatcaaattcattccctaaacctaaacaattctctttaattacctcgatcaacagattcaagaacagggaacaagattctctcttccatttgagcatgttcgagcataagctcctgtaaatgagtataactctttgcaaatttcctaatctccatcttcggtgttcccacagacggatccaccgcttttttacctccacgcgccgccagatcctccgaccatctcaacatcctctccatatgccacaacatactcctatgctgaagccaaatcatcttcactatcaatggagtcgcttcgtcgaagccttccagattaaacttccaaatcatcaaacgcggctctgggaacttatcctcgatgtaacggagaagaacctctcgagaacctgatacagtctccgatccgacttgaatcgtcggtttttggtcttccgatggaacgaaacggagcggaactttcttgtggagaagagcgaaacggagatacgacgtcactagactgttaggtggtccgtataatctcactgttgcggtaagctcaccgtcgatgtttctgttttcgcggtggggattcgttgggttggtggtgcggtggcggcggcggaaggaggaggaggtttgacgacgaggtcaaagggagagatctcagccgtggatttagttgagctggagaagcaggttcccatatttggtgaagaaaacgtgagaaacgaaatctagaatctcagagagagagagaagaagaagatgaagaagaagttggagtgaattgcaagaaattggagttggagaagattgagagattagaggcgcgtttgttgagaggagagaaaaaggtatcacgccattatcatattgccaaaagctttaggaactttgagagacttcagtatttttctttctcaccatttaagtgtttcccataattcaattcttaataatgaatatttttctttgttcctcaaaaaaaatattaaaggagatttctgactctttggaacctactttgctgtatcactggtcaagtcatagtcgtcatgagtctacacaattatttgtgtgatctaacaatctaaaacatgtttgattagcttcttaaaaaaaactac

SEQ ID NO: 29430 - DNA, 281 bp, Arabidopsis thaliana columbia
gacttttcaatagtactaataaatcgatctagggtttacggttttgtttcatttgcacttcccttagaataaataaaaaccaccaagcaacttggatcaatctagggattctgtttcgcctctcagtttcgtcaaactctcgatatccttactctacattctcctcagctttcagattattgaatgttgttgttaactgtctctgagtacgattgattgtgtgtcatatctcacgtgcgtcgtatttgttgaacgactgattcacaagtcatgatttgaaa

SEQ ID NO: 29431 - DNA, 451 bp, Arabidopsis thaliana columbia
gaggatagaggatcccccgatagatataatagatatatagctttctatatgtctcagtctcacggtctattagcaagttagcattgtattttacgttaaaaaaaaaaaaaatgttatgctatgggacatttacatttctgaccaattttgtttttgtttttagtcttgtaataggttttggccttttggctctggttttcgtcttgaccaatttcactattagatgtcttgtaacgttttaattcggttaatgatgtaaatggtcgacactggctgcttgtaggattttgttaataataccagtttggttaattcatttgttttgtcaattggttccattatggatataaaacgttgttaattagtttcgctataaaaaaaaaaaacttcttcaaacgttggtattttcatgttgtaccgcttaaaaatcattatccaaaaaaaacactga

SEQ ID NO: 29432 - DNA, 1087 bp, Arabidopsis thaliana columbia
ccagaccccacaatatcacggttcactacgaaggtcagacataccacgatcttgatacgcttatggtctcttcctcctaccacgagcaccacgtatcaagacccatatttaacatattatgagacatatggttactcaaaatcatagaatcatcaatattcttactcaccacaacctcccaaacataagccttaagcataagaatctaaaaaaacctcatatgcggcttagtaccattaattaatactcatataattcatgaaataaatcaatgaatgcaagagtatatgatcatgcaaccaaacaagcaatcatgcaaccaaacaagcaatcaatcacccaaataaacactcaaacctatcatgtgccatatcacacgcttcaagactcacagagattcggttgaaggtttaaggttagcttcaacgattctcggacattcgatggcttcccaatcttgatcccagctcaatttaactctcctcatcttaatctaacacctcttgatagaagcagccttgattcatgaagctttactccgaataaagacgggttcctcggaaggttctcgatcggacaggaaaacagcttggatttctcgctcatgggcaggaattctcgatcacagacatgatttcttcactcacagtaaaaaaatctcagtcacgggcagagtttttcaatcgtgggcaagtttccaatagtcggattgactcgaacttgcagtacttatcaatcaagcaataatcaagagaaatatagatcatgactcctaactaaactaaagaaaacgtttattttttaagacccaataaactcaaaaacggaaaataataagaatcaaaaataaaaccaatattagtaagaacctccccagtggtattaaaatccagagaaatcgggaaaaataaatcaaaaatgaaagaaaataaaagaaagggaaaagaaaaatcaaacttgtgggttgcctccactaagcgcttgttttgagtaaataggttgactctgtagttgcttaatcaacaggtggatcatgaagatccaaaggcttttctactggaatcttggcttcagcccagtagtgttt

SEQ ID NO: 29433 - DNA, 995 bp, Arabidopsis thaliana columbia
  unsure (1)..(995): unsure at all n locations
ttcagagaatagaggcaagaaataccctctaagcccctctagatctcatgattgggacaaagttgatagtagaagagacgctgccaggatgtcgtcctcttttggcaatacaaatctacaatggcgagaaaaaactacttctagatgcagtccaagacgggatagctttgaagtattgataacacgacgttttagcccgttttatctattgttttcttatgtttcagagagaatttggtgtcattctagagctaagaggagaaacacgtattctaggtgccaagaaggttttaagagttttgaaactaaaagtatcaaaagacaatcattccagtacttcaaaagtttagcatccgaccgagatcttccccatcacggaaacgagatattttgatatgtatggaaagttagaagagtcaagatttacgtcgaagtcgaatcaaagcaatctatgaagccgtttggaagatatgacccaaagagtgaagacatgtcaagaaccggccgtttggaaataataagtccaaaacacatccggccgaggagacttgaaccctggcagctccgagtagctcaccaccgaccattaggtcatgcccaagtccttccctctttgcgccaccttcattaggctgctgccctgaagcccactactcggcccgatcacttacttatccggcgaaatgacgttcttacccctaaacctaattcttggccctcaagtattttcctcaagtataaatacttgttctaagccctaaccctagatgtgccttcatcacctgcgaaccctagccgtcgcctagagctgtccactcgccgccgcacctcttgaagcttgaagaacaccatctctctctttctctttctcgttttcgtgtaagactatttaaagtagagctttgcctcttgtattctacatccaaagaagtaatctctaaacttttttttaagtnttattcatcttttgttatggttactcaaccaacttttga

SEQ ID NO: 29434 - DNA, 908 bp, Arabidopsis thaliana columbia
taggtttattagtctcttttcgtcaaatcctccattgacggtgaaacttgaaatcgacacgagttgggatatgcaggcccggcccaaatagcgtgggcagagggaaacatttagataaaaaataaaaggcccattatgtttttgaaaaagtgtaaattgacccaaactttttaaataaaatatttaaagggcctttgtattttcagttttttcaaaatatttttttcttcttttacagaaaaagaggctttatattttaaaaagttcggtttccttctctcttctctctctttcatctttcagagagaaagaagttttttcgttcaggatttgccggcggttattctccactgatgttggttccgcttgaggcacaattctcgtctttctgcatcagctttctcagtggtgtaggttggctttgcttccggcgtagatggctttcatagcatcttcgtccggctttgtttctggcatcggtggttttgtcaacaccggtggttggctctgtttctagcgatctcgtcgcttatctctctagcgagtattggctagcttttgctctagcttttgttttttttctttagactctttcgatttccaattagttttggttttctttggctctcgctagttttttctctttctattgatctaagtttctaattcttcaatccttctttgtttaaagggcttgattcgttcttcatgctttctaggttttaaaattttaagaacgaagttgtattgttggattgatgtttctcttagttaatagttcatgttgaagtaattgggagctgaattaaagatcgatactttggattcgattgaattttcgtttttaggtttgatgacctgcaattgaagattgaaagcttgtcgattgaagaagaagaagaagaaga

SEQ ID NO: 29435 - DNA, 607 bp, Arabidopsis thaliana columbia
  unsure (1)..(607): unsure at all n locations
tgtggcttccataacaatataagatgtactcctttttttttcaacataggaatcaagcaaacatatgatctaaaaaaaagacattctcaagctcaaaagttgctaaaacaaatgtgcacatcactacgagatatcatggccaagaacgagatcaggtggaaagaaacagtctatgaagcactacttgaagcggcgaagagtgggaacagggattttttcatcgagattatcaaatgtaactctcaacttctttggatcttgaaccctacctctggccgaaacctctttcagctggccgttgaattcaagagagagaagatctttaatctcatacatggtttagatgatagaaaggtcacgcttcttagatcttacgacaaaggaaacaataacattctccatatcgccggtcgtctctctactcccgaccaactttctaagatttctggagctgctctcaagatgcaaagagagtctcaatggtttaaggaagtagagagcttggtatcagaacgtgaagtagtgcaaaaaaacaaggacaacaagaccccgcgacaaatattcgaacattatcacgaacatctacganaagaaggagaagaatgga

SEQ ID NO: 29436 - DNA, 530 bp, Arabidopsis thaliana columbia
tttttccttctaaaaatcattctattatatggaagttagaattaatgttaaagttatacaagactataccacaaaaattattacataaacagatatgtgagtcattttctaaaaaaagtacgaagaaacaagatttaacagtaaattatatattagtgcaattttcatcactaaagaaaaaaataagttaaatattacggtaaaagtattcataacaataaaaataagaatcatcgaacaaaacatcaaaaaaaaattataataacaagattactcatcacattgaagcaccaaaaaaaacagcttgaatgatttaatctcatcacattcaagatagtgagattaatgttctcatcgaaacactataaaaaaaaaaattataataaaaatttcgatctaatactatttctttgtcatgaaactagcttgaattgataatcaaaatatttatttttaaaataatatgtaaagaaatctgttcaaaaatcactccaaaactagctacccattaatacaaaaaaattcaaaga

SEQ ID NO: 29437 - DNA, 463 bp, Arabidopsis thaliana columbia
tcacgaccgtgatcacctcttttatgctcatttcctttctctcacgttcatcctcttttttccttacactctttttacattaatcaaaaagaatcgaaactatattctaactgtgcctggttatatggttcgaacttcggtcacacgtgtgtgcgagtgtccttgtaaacaacatgaataggttgggttaggtaaagagtgattgatgatgaaacaaaggactttgggaaggaggaaacgtcgttgtccactagagatatgaaagtgcaatagtgactaaatcttggtttgtgaccataaacaacaaaaagcaaacccacgattttttttctaaagtaaaatacaaatgagagacgctccctcgagaaactaagttcactcactctctcacgccctacgagtcgggccatgcaccattgattcttctctgttctctcttttcttttattttttattttaatga

SEQ ID NO: 29438 - DNA, 441 bp, Arabidopsis thaliana columbia
ctatccatactaaaaacaagaatgagaagtagtgtattccattggtcttagtatcataattatctcaaaaacttcctctcttctagcttgcttctataaaaacaaagtaaactgcttattaatgagcttatatggatcaaagtattagatagaataataagtctaattcctcaatattcatctttagtggcccaatcaagatcatctatccgagaggatacggcccaaggtctaactcttacatatatctcttactacgagttacttcgtacctctacttattactgaataattacctaatgagtgcgggtagcatcagaccattaaaagatgggtattactttttgtcacagttatgcactcgtatctagtaaatgataagttacggatatatcaaaagataggatctctaactctcctactacaagtgattaaagacag

SEQ ID NO: 29439 - DNA, 525 bp, Arabidopsis thaliana columbia
cattagtaaaagtaatattgatatttttaaatgatttaatggaattaaaaaaagatatatgcagagtttgacatttgacatattagactgcacaagctaaaaaaaagcaaataaaatcaaatgaacatttatacaagaaatgaatgtatataaatggatttattttttcctttctctttctctccatttttttccctctctatccatttgtttacaactttacataaaaggaagtttctacatttgtcaacacaagaaaactggagaaaagccaggtttaaatgtgattcattccgagtctaacactaatagcagtcggtaccaaacacagagtcaataaacaatgtgcatcgctgtggtcagagaaaagatcttgcaatctctctgagctatcctattagttcatggctagcttttcgcataaagattgatatgcacagtgcagagcttgaatttttcctcagcttcattctgtgtttcgtcataccaatttgtagttagtgtcaagaaacacgtacagggatg

SEQ ID NO: 29440 - DNA, 552 bp, Arabidopsis thaliana columbia
gtgaaattgttgaaacatttcgagtcaagaattaattaagtaaaactacgacccgtgattcttttcttcctttgtcgacaatccatacgcgtgaatacgtgattagtcaaatgtaaaatgcaaaaagaaaaaacataaaacaggaccataccaataccatattctcactataccaacttcgatttcataaacccaaataagaaaataaaaacaaaaactccacgctgtatttccatgtgtgcgagatacaagaatagactcgacatgcaaaataaaaataaatatgaccaaataatcatataatatcttagaataaataaattaaaaaatcatagtaaccattttataaatttcgtaaccttttctccgtcatcccccacataccactccctataaatgccaagcaaaatagctttcctcgatagttcctaaatcataactacaaaaacttttccttcttcttcctcaacctttgcttcaatcttcaacaactttctttttataaagattttgcaagttaagtgtaacctacaaacaccaacatggtggttt

SEQ ID NO: 29441 - DNA, 495 bp, Arabidopsis thaliana columbia
tcctataatacaacttctaacattactagtatcaaacaacaactaatatttacgtatagttaatatttacataaataaaatatgtgtatatacaaaagaatcataaaaatgaagaaaaagtaattaacaatttcttcttagaaaagaagaaatagtgaatagaaaactataaaaagttgaggctatacattgtcatgtgtgtttgtgtcaacagtctcacgcgtggttggatggatgcttggaataattacaggcaccgcaggctcaccctttcctagggtttctccaatttaataacattaaagttttcgtatcgtgtttttttttcagatgcaagtcaaatcattaacaacaaatagtgtaaggttagttggcccgagaataataatacctgaagaaattatagtaatagtctaatagaccaagacgaacgactgtaaactgactatgggtctcacattgctcttcgaatcattcagtaagactcttacaaat

SEQ ID NO: 29442 - DNA, 489 bp, Arabidopsis thaliana columbia
tccaaaattaatcaccaatttgagtgcctccgaatttattcacaatattcattattgaaaagcatttttggatatggccaaccaataaaatgaaaattgaactttaaaaaaaaaaaactactataccaacaatgtaaaaacaatgtgtgtgttcaccatcattagaacaagatctactcaatgttttaaatgtatatataatatgttttgcgcaaaaaaacgtatatgtaatattatatataccccgttcatgataatgttttcacattctcatatgacacccttggagcaagttgcatttacgatccggagacctgagccaagacatgggcggttctcaatttatcatgggtattatccaccagtggtggttgaaccaaaattcatctattcattttctctatcaaactttttgttactttgatggtttgtctcaatcgattaaaatagtaactagttatattgttttggcatgtcactgaattgatg

SEQ ID NO: 29443 - DNA, 668 bp, Arabidopsis thaliana columbia
tctataataaaagtaatgttattcaaactatatagtttatctagttaagaatttttgtaagagggagttctaaaataatccttttctatttaaaatttatattaaaaaaaatcaaatgtaatattatattaaatctttgtatttactgtttaatttcggtgtaaagaatttcagtcatattagtttctaagcaactgtgatttctttttttttttgtatgaatgaaaaaatgtattcaccaaaaaaacgtgtattacaagaaatgcatccttagttttaatagatcataaaccaaaaactaaaggattcaaactctagaaaaagatgcttttttggacgagagagaaaacggtaccaaacctgactcccgagaattcacatttctctccgggttaacctagatcttgtttctagatctcctctggttcccttggtgtcgccgtttttctctccttctccgatttaaatctccctctaaaccttcttacatcaagtaaagatttttcttcagcatctaagaaaatggtgagtcgtctcccctatgcggaaaagggaaaagctcaatcatttcctcacagaaccctcaacctcctagagtttaagtccctgctttcgacaaccctgagcttctttgaagacatgaactcacaatcatatgaaaactcatc

SEQ ID NO: 29444 - DNA, 582 bp, Arabidopsis thaliana columbia
ctttgcatctctgattttactcgttgttatcgcatgttgtttattgattgattgcttgttgcttgttatttcttgtttgccttatctaacgttttattgttggggctttgggtgttttattttcgatattaggagccaaactcgttgagtatctcgtattcatgatgacactttttgttgcaggtaaccttagagggataagccataaaggtttcgttgggacaataggtttttggtgtagattggttgggtagaagtgtaaaggatactattgtgtattatgtatttgtgaaatgggatcttcgggaaccttttatgtttgattggtatctgtttgtataaaatttctactacatataaaatggttttcataaagtagggatggttgatgatataagagtctgtttgaaccgcataactttctttgtcggtaaaagggatgacaagccggatatcgatattggaagggacaatgctaagtattggcaggttggggcgctagttttgtgcttaacccgatatgctcgtacgaagtactcgcacctgtacgaacttagcaggacttctttctagtaaggttta

SEQ ID NO: 29445 - DNA, 589 bp, Arabidopsis thaliana columbia
tcaatacattttcgcgtttgtcccaaaaaaaaaaaaatcaatacattttcgtatgttctcaagtttttagataaacttatctaattacattccctactatacaatgtatcctattagaacttttattttatttttttgtttctaagaatttataccttatcttttctttagaatctatatgtttgacgttatcccaaactgagccccacttaaagaaacacaagtaactcttgaggacccattcgatcgtaacacaacaaatgatttgatatcagaaattaccgattgcccatcgtattacatttcatctctaggtcgcttggttaaaagccaaggggcgattatgttattgaaatggttgtcttcgagacttcgtggacagactttaacgacctgaagaactgaagcaaacattttgggaaatgaagatcgaacgatagaaaacgaagggagagtcaatatctcaaaaaacaaaaggcacgtgaatgtcgcgtggtatttattgagagctcatttaataatttattatcatatacattcattccggatataaaatttggatagattatgcctcaaatttttttatttt

SEQ ID NO: 29446 - DNA, 533 bp, Arabidopsis thaliana columbia
aatttgtgggtcttatatttttttggtataaagacaggcattttatacattttcccatagttttcttcggttctttgggaatttcaatggtcatattccaaaaaccaataaatatctctccttgtttccctcttggcctgattaaggagccacttcttctatcaactgcgtagttgacattttttctgtgaattattggtaccacacatttctgctaggtgctcaatttaaagtttcttcattttgtaattcaaataatgtactgaatatcacaggaaaagaaatccattccatacttgaaaaaaaaaatgtaatctatctctatcttccggatcaaataagagtttttgataacaataagaggatcaaatctctctatattagttgaaatcagaaacaaagtacataaaacttaactacttccattcataacctccatcggactaagttgtcttgaaactgacgacttgcagagatgctaatatggagacacttgctgcaacctgcaaaaggtttcaaatacgtttgggtgg

SEQ ID NO: 29447 - DNA, 941 bp, Arabidopsis thaliana columbia
  unsure (1)..(941): unsure at all n locations
tggtcaaacacttttctttgttgcttttgtcaacatcaggagatcaaaggttgacttgtgtttgacacttttaacttgctctcatataaaattaacaattatcaattgacatgttgtaaagatgaaatttttcatacaacagcaaaaaaaaacacattttcacattgaacaaatctttagctaagcttctcgggattttgcagcttttagtgcttcaattactgcagagaaatcttcatcgctcaacccataagattttgcaaccttgtaaagctcgttcgcagcggctgcaatcggagtagattgcgatacggattccgctagtccaagtgcgagtctcatatcctatagacggataaaagtcaattacagtctcatcaaactccagagtctttgtgagaatctaaaaaaagaaagtaacacaattacacaaaccttctgctgatgctttaatggaaaagccgtcgggtacactgacttgatcattgaaggaccctttagtgagtacattggcgcattgatagctccctgtgagacaacctgcagaaaaaaatttcccggggtttatagcacatttggtaagaaactttctgctggacaatggtgttttagttacctcgacaagtacatttggatcgagtccaactttctggcttagaagtattccctccgcgaatgatgccatcatactgcataggtaaagagaaaaagagatcagaagaagaatctggaatttgccaagaaatgaagcgatagatggtcaaatgataccttcccatgatcatgttgacgacaagtttcattgctgctccattaccaacttcacccaaatagaattttgactggatcatataatgcaaactagtaacgaaaatggttcatttgcagaagaaaaaagaactaaaagcaanacacaggcaaaagagataccttcccatgat

SEQ ID NO: 29448 - DNA, 512 bp, Arabidopsis thaliana columbia
tagtaacgtgcgccagtgtgctctaaagtgggatatgctgtatggcttgctggctctcctttggcctttccgggctctgctggccatgactgcaacaatccaaaccctgaccatatgaatatatgggctctggctggcttggcttggtatatgcttgcctgctgccctgcatatgcatcctgcctgcttgggctataaccccataatctaaatctggaccatgatataattctgcttggtaccacaaatctggctggcttgaaaccccaacaaaccaacccctgaccatgtgcctgcctgcatctatgacttgctgaccactgcatatgcctgcttgcctggctctgggccctgggtctaatggaataactgggcttggcctgtctctgcatctactgggctctgctctatgctggcccggctctaatgcatgattggctgggctgttcttccttttctggccttcctttggcggtatatctggtatacatttacctagttggccatgaact

SEQ ID NO: 29449 - DNA, 560 bp, Arabidopsis thaliana columbia
actttagttttgacaaaataaaacatgagaaatttaacaaacagtatgaagctttaaatgctatatttgtattttaaaagtatttactgtattaaaaaacgatgttactaatcaataaagcttcaacttttaaaaatgtcatttaatgcctaactattcgctgacttaatgattaaatggttaacttatgacgagtatgctatttaaacgtctacaacttgaaagttgaggtttttctagtttttccatttttatatatactaggttaaaacccacgttatatcgtatgatcatttttttgaagacaaaaaaaacattaaaaggatgaatttttcatcatacagcaatttcaaccaacttaaaatttgtaaagtttctctttatttttgtcattgttatgtttccaccaaatcttatcctattagcattctcgctatatccacggtctttctggtgactctgattgatgcaagaattggagctactccatcctttgatcacttgataatcaggagttcaaacttgccacgcggaaggtgggtaatgaaagtggtgatctg

SEQ ID NO: 29450 - DNA, 946 bp, Arabidopsis thaliana columbia
cgactctagagtagtcggcgacaggactaattatatcatgggagacacgagatttactaaaataagagctttattactatcaatgaaaatatcgagttataccacctatacgcaaaacctatatctttacaaagacaatgcaaactacacctgttggcctaacatccttcgctcccactaaaggttacctgtaaaacaaaagtagaatcttgagtaatctagcattactcagtaaggccgggattctaatagtatcacccaacccaacccccaatcacaacgattaaattacataagattcacaagcaataaattgaacaaccactatcaatcccaatttagacatgctaaacaggcctctacgaattcatgatatcccccccaaggcgaggtctccacactcctagacacgacagtctaaaagagattatacccctcaatactacaacgtcatgtaccgcttgcccgggcatgacctggtccaaacctttgtaagccataatattacggagtttcacgtaacgtacaacagacggatggactatcatggttcgcctaacaatagttaaccccctattgctatacatcattacatataaccataatcatatgctgtccgacagcataacggttactctaacaaacgggcagcataacgattacacaatccttaagccaaacttcataaccaatcaatcacccaagtatcaatgattatgaaataataccaagtatcaactagaaacctcatgcataatttcgcaatactcactaaagcccaatccgatgtgtaacgttcacccggctcggttacgcaccccctaaacacacgctttggatcgtatcgtagatcggagactctatcgggaactagctttatctctgatgccagactaagctactcggcagaccgtcgacattatctgaaagctctttcgggacgatt

SEQ ID NO: 29451 - DNA, 1125 bp, Arabidopsis thaliana columbia
caatcatgaaaacttttaaatttacaaatactctgactacttgttcagtttaccaagaagaagttagggagttcttgaagaaatcacggcatctatatcactctatttcggatagaaggtttaaaattatcccaaaggaaatatgaaagtttaagttttttgaagcataaaccctagtcgctcccatcgtctagcatcccttgtaaggtagcgattttccccctccgatggagtctccggcgctgccgatggcgtcttctccttctcttccctctccaactcagtcgtcgcaagcagactctcctcccataagagacccatgggtctttttggctaaaggaaatcttagactttgttgttgaaaatagagtcgcgaaagtcacaatttcaggaaaagtagtgggtgcatcagtgtcgttgtggaagtgttttattgtcggtgtttttatgggtgatgccctgcacgttggaattattcacttgactatgaatcacatttggattgtgaaacgtcccatcccgggctgtccgcccggtgaggttgttcccatccgaggacaactcaagtgtcctcaggtcttatccgaattcgctctaagtgtaattggcagcggaaattctgagattcataagtaaaaaaagagacgaattcacataaagaaacaagccaactttattcatataaggtttcgaacgacatgagtgtttgcactataggttattataatcattcgatccaatactttaacttaaacaccacccacttgcccggacaaccatccttgccgctaagccatatccttcccacgaacttggtcatatccttggtcgttcgaccattcgcttcctcggcctccgtcggcccagtggtgccgggagtgcccatgatctaaatctcggtcatcttgttccgttcgttcgcacccttagaaagatcacgtttcttttctgagttttggtgagagtttcggtatatggacttgtgtttttccttggctgaagggcgagttatttataaggaaggggcgaataaccgcccttgcgaacgggcgcctctaggtcctttcggatccttcagggcgcttccttcccaaccacacacgtggcgcgtccttatggcccggg

SEQ ID NO: 29452 - DNA, 569 bp, Arabidopsis thaliana columbia
ggggaagatgatactgcttcattaagtggaagtttcatgtccgagtttcaagtttctgggcagaagattcctctggacctttccttgaagacttatgctcgacttgtttcctcttctccattaagttggtgagttgagctatttctgatattcatgtacattgtgtaatagaatcatatgatggttgaagttgaatctgagtgattcctccttgacacctcgtaatagtttaacacataccacttcctgatgatgatagatgaaaatatgggttgtcatcacacagatgtattccctttatcttcacttttttcatattaaatcttgttgacctagtggttttcttttgattcaaagtttgattcagtttattatattccattctcatgttctaggttacatagatcaatcatgggtagcacatacaatggtatgccacagctgaagtcgctgtcgtgtaatgtggtaaatcaagataacagtagtggttctggagcatctgtggtttccaggtgtaaattccatgcactacactcgtgggtttccctcagtccaccttgccacctttt

SEQ ID NO: 29453 - DNA, 605 bp, Arabidopsis thaliana columbia
tgaaaatatatattataatattaaattttataataactaaagaaaatataaattgtttttgtactttttatttatgttatttatattaataaaaatatggtaaatagataattaaatgttattatataaaaaatgtttacagttcttaaagcacaaaaaaatgtgttgtacaaattttaagagttacagctaaaaaactaaaaaaagttgttttgagctatgagatttttaaaaaaagctaaagcttgatttgctcaaaattagggttttaagttgttttggagctaaatcataaagatacagcccatccaatcaccaactcaatgttcaaacgggtttgtccccccaacgacttggtccaggccattaattatttaatatttagagatcggacggctcttgcatgggcgatgaaactctaagaccggggatggtgtatctttatgatccgacggtccagaatcatcaaagacctctgatattcaaacttttatttccaaagttttacgtccaaaatccaaataaatctaaaaaaggatcagtcggtgttcttgttcagcaagggcacgtgagttgctgcgatgtgtactttagttttattttat

SEQ ID NO: 29454 - DNA, 585 bp, Arabidopsis thaliana columbia
gcttaaacacttctacttcttttcctagtttatctgcagtttcctgcatcctcttctgagactcagccatttctccagccacttccctgcaacttgctccaaattttaatgtctcagcttcacaacaaaccatctccttctctgtttcaagtaaagttttcctgagatgactagttttctcatgaagtaaccttagtcgcctgtacgaagccataaattcactcaacatttgtacatgtttccctgaaatactctccaattgaagcttctctgagttgtactgatcaattaggttctgcaagcaagggaatgaccactcagctccatcaatttcaggttgctcatggtttgtccttccatgtatcacaacagaaccactagagaccgtatctctgatcaaatcactcatcgcttcatccacactcaacttagaaagagcactatttgttggctgatcaccattctgagtctttttccatggctcttcaggttcgctcgtaaccggatcaaacagagagatacgtagtaaatagcataagagttcaaagaacaaaaaagtgtattctaagcataatactttaatag

SEQ ID NO: 29455 - DNA, 434 bp, Arabidopsis thaliana columbia
tgcacgtgtctcaaagcttggtagaatgtttgggctctacgaagcttctgaggcccaaaaagtaattggtctctcttatgcatcgaagagtcacggtcgcataacggcatacgtagacaagtattgtacacgtggactgttgacagccgacgtgtcaaatgtaaattgttacggaaccgttactattgtcatcttccgtagtatctcaggttctgcctttgtagtgacggcacttccgtttacttatagaccaatttacacaaaacagaaagtgtattagataatgcaaagcagagtcagcagatctcaagaactctaaaacgatgggttcatcaaaagatggtgctagtttcacaatatctctgtagacgagcactttagcctctcccaatctactacttgtggtcaggtaataggttaaaatgaaaaattag

SEQ ID NO: 29456 - DNA, 591 bp, Arabidopsis thaliana columbia
ttaaataatttatacagtacaatttagattttatacttaagtttagtatagtagtgtataattatgtaaatgtaatatggttgatttgaacttttaatgttattaaactttgtattttctttaccaaatcgaaaatgtgtttttttctctttttttttggatttgtttgttaaattctacttttatatgaaaaagctgatatatttaatagatgttagatctccaaaatgtgtctcaattaatgtataaaagatttctctaccagatagatgtatcaaacagtaacaaaaaatctaaacaatgtttcaaacacatgtaaaacgagtgtaactaactttgcaagaattaactttgccaaaaaaacaagtggttacaacacgagtttatgaatttcaaattacatttcaataattttgtaggaatggtaaattagacttgcataataatttacgagttgactgattcatatgaaaagtttgttctataaccaccacttcagtttttctctacatattttttttgtcctggtaaagatttctgtaccaatattctccgcatttttggttaactcacttaacatgtgagagagca

SEQ ID NO: 29457 - DNA, 499 bp, Arabidopsis thaliana columbia
  unsure (1)..(499): unsure at all n locations
tagtaacggccgccagtatcaagatggtgtcttactaattgcttacactgttttgcaagattcttcacaaaacggctgtaacagttccgtacagcggcatgaaaacccacgtatccatccatattttcggttttcttctcatctgcaaagaccatttaatcatgaaatgcagggacactagcagaatttaaaagatccaaggaagcactgaaaggttcttacattctgagttttggttcaggtttctttctagagcaatttcaaagagacttcctaatacaaaggcaagtctgtcgcaggctgtgtcaagaagaggagcaagccatgaccgtgcagcggttcgagcaatttctgctgaagcttctgttactcctctaccacctccacgcccagcatgagcaagcagaatgtttgctacctgctcaattcaggctacttgtttagctttttcatttctatgaaaaagtaganaatgctatttactgagaaaaggtgaagt

SEQ ID NO: 29458 - DNA, 347 bp, Arabidopsis thaliana columbia
ttttatctgaagaaagtctggatattaaaaaggataagagaagagttaacagagaaagaaatgaggttagcatttaaaagaatttgtattgtctcacaaagtgttaattatgtttgttttcaaatctattaaaagattatctttcttgcaacttgaaacaacccgacccgtttttttttttaacataattaaatatttccataaatacttaattaaactaaccaatacagcaacatttaaaccgcaagtcgaaaatacaattttatgaataaataaataatttgaccaacaaaaccaaaaatgactaacaatcctaacacaatcctaaccgggttccaataaccaaa

SEQ ID NO: 29459 - DNA, 659 bp, Arabidopsis thaliana columbia
tgaacaaattggagataatgtgaggagtggggtttcttcattgagagataattttgaagaattagaaaatgggtttcatgtgggagattttgtttggggagaagaagccaatagtcaacaatggtggccaggtcagatttatgattctttagatgcttcagacttggctttgaagacaatgcagaaaggtaaattacttgtggcgtattttggagatgggagcttttttggttggtgtaatccattggaattgaaaccgtttcttgagaatttcaaagagttttcgaagatgagtgattcgagaaggtttcttcttgctgtggaagatgctgtgagagagattggtgagcatgttgagaagtttttggtttgtgatgacgctgctttagttagttctgtagctttgaatttggggattaaggatggtgttgttgtgcctgatgttagaagaaagattatatcgtctttggttcttgaaaaccccggtgttgttcttgaagatgttaaaagacttgccatgacggttagatttgatgatttgttagagattgaggttttgaggaggaagatatcggcgttttatcggtgtaaaggaacgtttgatttagctaagtttgatgaacatcgatatattataggacttgaagacaaagagcatg

SEQ ID NO: 29460 - DNA, 571 bp, Arabidopsis thaliana columbia
tgttgcttggtacagtgcacatatatctttcaaccttttccttatacattgcattgcatcgtgttgttccatgagcgaatctgcttgaagtaactgtgatgagacaatccttttgcagatattgttgcataactttggactaaaaagtggaaacccaaattccacggttaaagggacccattcatacttctcatcattgtcgggagaaaaatgcttcaatgaatcctttgctttaaagagtttcaaaaggcgaatgtaaccgactgtcttcaattccatattgttcgcaagcttagttaaaagagagttcaactttgtattttcctcgaggggaagtccaagctcatcaccaaaatgaggaatggaaccatcagaattctttaggggtaatggtatatctaaagtaacaattcttccagagctatcaagatcatgcttgctgagaggctgaacaagaacagctgagcacttgagaaggcaatttaaacagtgcaacagaatacctcctttgaccaagttaccttcaaacttgtttcctaaccacaaccgaagatcatccaagccaaatgat

SEQ ID NO: 29461 - DNA, 552 bp, Arabidopsis thaliana columbia
aacctgggggtcgtggctttggactcgaattcaataacctaattaagcaataatcttataatttcgaaggaaacaaaacaagcaaattttttaatgttaggtttaaagctttgtgaaaaaataatagaaaaaatgtactccatctttttctaatcattttaagtttattccactttaattttgtagttttttttttcttttcttctttattgactgatattataaatcacaaagttcaggatgcaatgattaaatttattagattacaatcaatgagtattagtttatagttattaaaaatatttaatataaaacataaacagtcataaaataatgtttaatttttaatgtgtgtaaaatccaaaacatcaatgcttacggagatttccttaagattaataaagttgatttttatgtaataagaaacaaaatctcattaaactttaaaagtaaaaaaaataaaaatatgaagtgtcacttatggtagtagtaccaaaacaataagttaatggatttgtttctaaagaaaagaaaaccactataaacagagga

SEQ ID NO: 29462 - DNA, 507 bp, Arabidopsis thaliana columbia
ttctaatttaatataatgtcagcgcaactactagccatttcatataatatcaagtcagaccaattattatacgtttcttatttttctattgagtagtgatttgattgttttttggttgttttatataatgtgtttggtaagaccgataatacaagattagttccggctgctcaacctagtggttccactcgaccagcttctgacccgtccatggacttgaccaatcattctcagtttcatcaacctcctcaaggttctaaatccatcaaggtctctatccatttatgtttttttaatcatttaattgctttgtcgaactataactcgagtatagatatagacttgttgtggttgtttttagaagttaatgggtcatatctaaatgttatggcagaaggaagggaaccgcaaggtcttgcctcatcggaccatgacatacctaaatcgtcagaccctaaagtgagtgtatattcatacaactgcagaaaattaataagattctttttt

SEQ ID NO: 29463 - DNA, 387 bp, Arabidopsis thaliana columbia
tgttcaatttgtagtgctgatagatctcatctgaagaggaaactcgatcttgagttccagtaagactgttggttatgcactcttctcttagcttctccattttcatgttctggtgaaaccacaccattgttaagttgtcaatttactgctgcttgtgtaatctggcgatttattcttttccatatttagcttgattacaaaccagagggaccttagattcacaatgataatattttgttgtcccataggctttttattcattgtaaactgatcacactgtactatgaagtctatgattatcaagctttcgactgtctgcctctagaattctttgcggtacaaagagagctctgtttccccttcaaactcatttccctctcgatggtg

SEQ ID NO: 29464 - DNA, 545 bp, Arabidopsis thaliana columbia
ccctgactcagctactattgaatcagatcacaacttagactagccatacaagaatattgacttatcattaacttgacgatttcttacttcataaaaattaattagtcaaacgaatatctatttcttaatttgtaaattgtttggtaaattctctaatatttatactgttttctaagattacaaacaactctcttattttcatgcatgatttacacgtgaataagtaacaacaacataggtccgcaatgatacccaaagcatttcctgaccattcacaccattcaggtctagtacttgtgctcttattcaatcatatatgttatcactagatttgtttctttatttatcccttttaatcaaattgttcaccagtttctacggctcaaaaaccaaaaaaaatcataacacatgacacatgtgacatgtcaaatatatatattgctcaccaaaaaacgacatgctaaagttttattttccacagaaaattcctttttttgtctttttattttttatataactaagaaattttccacataagttttttt

SEQ ID NO: 29465 - DNA, 253 bp, Arabidopsis thaliana columbia
ttttaaacgaagaggagataagttaatggacaagtgaaacgtgttgtccatttatacttcttattcatagaactaaaaaataatgtgtaattgaagaaccatgcatagatatataagagctattgagatttgacatgtattttttcacacgaccaaattaattccaaacatatatctataggttttgttggggggttataatagttatgtatgaaagatagatgtttttttttctttttttgttttgttttta

SEQ ID NO: 29466 - DNA, 391 bp, Arabidopsis thaliana columbia
  unsure (1)..(391): unsure at all n locations
tctggtgatattctattggatatgtttaatgaactctaatcattctatgtaaacagtattcccccccccactaacacggcacacacacccacaccaaaaaaaaagaaagaaaaaaacatggcacaaagagaggtggcgaagtcatgctgccactacttgccatcacaacatatgaagtggcagctatgggttcaatcattttgtccttaaaacccagctttattttcctttctcctttccctatgtcaancttttactttctcctttgtacatccaaaaacattctcttacttttacagtttcatgctagacataaaacttatgccatacgaggaagaaacctggatacaattcaatgtttttgtcagtattttcccaattcacatagtgg

SEQ ID NO: 29467 - DNA, 558 bp, Arabidopsis thaliana columbia
cttatttcaaattttgcatcatctaaggcatagaaaaaccataaaaatttgaaatattttcagaaaatgatttcataaaaaagagtgtcatgtagattgcatatcattttaggattgtatatagagtgtttgcatttaggattgctcatttgcataggggatgatgatgatttcaaatcgataagcatgttttgatttaatgaagtaagttcaatgcctaggttgttagttctctgttgcataaccgattgtatctctgaagtaagaacgcaccctgctttgaatttgtaacttgactatactactttgatcgaaactcgcttatctgttgccattccctatctattagaacctgaactgaatttgaaattatcatgtctatgcattgtttatgaactcatggctaccatatacatacttggattattttattcatttcatcaccctctgttaatccaagtagttgtctctcatttttagagcagtttccatacccttagcctagccttatttcaagccaaagatcatttgtgtgtgattgtgaggtctttttgattg

SEQ ID NO: 29468 - DNA, 587 bp, Arabidopsis thaliana columbia
cccagaaaataggcttacaaaggctccagactggttcgctaccgaccgggcgctacatgacgatgtagtataaggaatagcaattttctttagactttgtgtctaggagtgtgtaggccattgcctcgggatagcatggtttcgtagaaggccttacctaagttatcggaagcatgcttgcattagttttccgttgcatattaggaattcgagtctgcatgtattatgcattgtgcatattaggaattcgagtctgcatgtattatgcattgtgcataatgttttacttgtattgtatgttgcgtgttatctttgattatgtgttgcttgtattactcgtatctgtttatgttaagtcgtagtattattacgtgttgattgctgcttaggggtaagggtagtaggttaactctgtctagatccgaggttcactaagtaatgctagattacttataacgctacttattttgcagaaaatcttagttggccagccttgtaaagggcgcaaatgacttaggacgaaccaatgtaggttttatggctttttgcaaatacttactaagtatattatgtatggtttcaaagag

SEQ ID NO: 29469 - DNA, 648 bp, Arabidopsis thaliana columbia
ttctgcaatcgcagatcagagagaccttgttaatgctcagcaccagattcagatgtaatattcacaattggttttgaaaagaaactccaattgttacatgcactgaactcttgactatactgtatatgagagtgagagaaagaagaagactgacttggataagattctagggactgaccatgaccggcaaatcttgcttcagttgcctgaaaagtttcagaaaaataatggtgacttaatgcacccaatggaaaatctagttttctacaccaagttcacttgatatatgccaaagaaacagaccgtggtgaaggttgtgctttaacttggccagattgatactgcaaagtcgcctccaacatggactctgccataactgccctctcctccatctccgcgagagctgcaacagcctcttcatacttttcctacaccattagcattatcatactgaggataactttttgtgtcgcctcgaataagtgtatactgagacaaagaaactctaacaagatgacatcctcataatataaacatgccacaaggtatcatactaaagaagaaccagtaagctccaaatttctaggaaggaatcaataggcataactatttctatagcaagtagataagtcagtcgataaattagac

SEQ ID NO: 29470 - DNA, 452 bp, Arabidopsis thaliana columbia
aacaaggcttgcgacgtcagtgatatatgaggatacagtcaaaacaatgtttcacaagtcaaacatacgtaagctataagacgagtaacaatcaggaagatacacgatattcaaaaggctataaatcgaagaattctcattcccaaacccatatacgctagtttcagtaacacctagcattgcttatcatgcatgattataagaatgtcacaatgggagaagcaataaactcatcaataaaagtagttccatcaacaagaactgctacgttaatgatcaccttgtgagcttaactagagacctgactaccagataactagatcgaactcgaatttcaagtccactttcctattgattaaaaacacttgttttggttaagaattatccgcttgagcagtagaattctgccacaggatagtaatatatgtgtagaattgtctatgcagatgtta

SEQ ID NO: 29471 - DNA, 591 bp, Arabidopsis thaliana columbia
tctaccacaggatagtaatatatgtgtagaattgtctatgcagatgttagaaagcaaacaaatttcatctatttcgagtcttgttcctccctaatcagacttccttcacagattctaagttccacagagcaaatatcttcaagcagcaattttcttttcaaaatcaaagctaattccaaaaagactttgactgattcaacacataccttaagcctctgaaaacggctgcgtgcaccatcgctgcaggaatcagaagtcgtcgtggctgcgatttcaacggtggtgggagattcggaagccctatcaagcaactcaatagccggcaaaggtttaaaaccatcagcggaggctttagcagaagaagagagaagaggatgataaccaacggcacgaaggatctgaagaaagatctgatagaaaaaagcgagccagttcaccaaagtcttccacacttgaaacgaacgaggagagtatcaacatcggcctgagtcaactcggccataagagagtctcggagaagaatgcaccaaaattttcagaatctgaaaaaaggtgagatttagagaagaagagaagaagagcttgaggaag

SEQ ID NO: 29472 - DNA, 1602 bp, Arabidopsis thaliana columbia
ccctttttattgttaacgatcaaccctaaatcggaaacaaaagtgaagaaacctacccaaattgccaacaatccggcggctacatacaaaaaggaaataaccctaaaaatcgcagccggagttgaaaagaaaaataaacaaaatcgctaaacatatgtatatagaattggaattatgaccaccaccaccaccgccttaaagaaaaagaaaaatggaaagacattaatgggccttaggcgaataaataggtcaacttaaggaaataaggagaccgttgtttgttgcgttgtgtttgatttttttgattagctttaaaagcaagaaataggcgtaacgtccacacacacgcacaatcacaattcctttatatctctctctctcagctttctctcccactaaatttatcctctctatctctctccacgtttctcgccaacaaaaccaacaaacaaaaacgcggtctctctctctatattagagagctgttcaacctaaatcgtggacaaatctcggaatctgcggcgacaaaaacagaggacgaagaagaagagaatcagaggaagaagaagatgtgttgtggacggatttgcatgctgtgcacgtgtttgcttcttgtggtgatcgcgattgggtttctatttggattcggtgtcttcaaggatggatttcacaagatccatgaatcaattcatctcgaatgcgatcccagatttggttgcggcggtggccttggacgtcgcggttatggtttcccagctccggccggtggttttaattagttgtgatctcaattcttttcgaatcggcgttttgcctttgaattcgaatttgggtataatagcattgattctttaggttatgatattcgattgttgcttcttttttaatactttccccactttctcacatggactcactcattgtgcattcgaatgtttcattagttagattttagtattgaccttattattaccttatgattgttttttctttcaaaacgtaacgtatgtgattcgtattcatcattatttaaaagtttccgcagcttttaagcataaagttaaaaaagaaaaacattatatattttcagataatctatatatacatttttggaggggattttgaagataatgttgaagatttgagccataattcaacaattaattcaaatgggtggtataaccctgtttaactctgttcggatcttggattgcaggaataatgttatcccgatctaggattgctgacgtgtaaagaatatttttatatgaatattatttccaagattttcttaacattattagttatctcgaatacaaatatatctatagataatcttctgatttataacaatctttaaatctcgatacactatatatcccaatgacaacaatatattctctaaatcttacaccatccaagaattaagcttttaaatctatacaaattttcgtttccctccttaataaacgggttatctactcaaaatcttacaacaatatattctcataatcttacaccatcgactaagtatgctttaaatctttaccaaatttcgtttccctccttaataacccacacgatattctcacttaatataca

SEQ ID NO: 29473 - DNA, 384 bp, Arabidopsis thaliana columbia
taattttacatgtatacacctaaaaaactatgtccatgattcatggaagttgctaatcggttttacaagtgtaaagaattcacttatttcgtctttacaaattataagttgtaagataaatgtatctttttcattagattatcttagatattctttagtatgtcatggctacgattccatgatatcatcgaccagagacaatcagaaagtataaagcagagactctttaaaaagtgtaggtatgtgctatgatacacatatatttcattttagatggtataatacagtgacttacacttgaaaaattacagggtgcgtagtgagacatctatatcacatgaactttgcactttacaaggaaaaattatagttatctgaaatgca

SEQ ID NO: 29474 - DNA, 566 bp, Arabidopsis thaliana columbia
  unsure (1)..(566): unsure at all n locations
cagaagttaggttcaatgtcccggtccaattttcaccagccatgtgtcagtttcgttccttcccgtcctcttctttgatttcgttgggttacggatgttttcgagatgaaacagcattgttttgttgtgatttttctctacaagcgaatagaccatttatcggtggatcttagaaaattattctaagtccaacatagcgtattctaagttcaacatatcgacgaactagaaaagacattggacatattccaggatatgcaaaagaaaacaatgaatattgttttgaatgtgttcaagtaaatgagattttcaagtcgtctaaagaacagttgctaatacagttacttatttcaataaataattggttctaataatacaaaacatattcgaggatatgcagaaaaaaagatgtttgttattttgaaaagcttgagtagtttctctccgaggtgtagcgaagaagcatcatctactttgtaatgtaattttctttatgtttcactttgtaattttatttgtgttaatgtaccatggccgatatcggttttattganagaaaatttatg

SEQ ID NO: 29475 - DNA, 551 bp, Arabidopsis thaliana columbia
ctagaggatattttgtgcctttgtttgtggctatagcctttaaaagaggctttgagaccagcttattactctgaacgacccgtatttaaggtaaataccatagcacacataccactcacaagcacaagcttctgtgtattctttcctaatataggacacatgtgaaccataaactgaccaaacatagaccagcttgagtaacaatttatccaacaattgaattctccagcactcctagagtttggatgaggtatatatatatcagttcgttgtcgttgtgatatgataggccgagccataaatcatatagacagaataaaaatgtcaccaaagatttacaacaaatcctttacattgttagaaaaaacccaaccttatttccaattataaaactttacatttgaaagaaagaaaaaaaaaaacaaagaagaactgagaccagatcttcaactatgtcagaatcttacaatatggatcatcataataatacacaaaggttctttagaccaagaacctgttcagattagagagcctctacctgagtggatggt

SEQ ID NO: 29476 - DNA, 560 bp, Arabidopsis thaliana columbia
tattcttttgaactaccaaccaatgtcattcaataatatctgaagacaaagcaaaccaattcaaagtaacaatacttaaagatgtttgagaattatactcaattactcattgtggatcaagagcattggagtatctttttgtcaaatatgcatcattattactttgaaaactatgcattgacttagattgagtaccttcttacacttgttattaatgttgtattctgaagaattggtgcaactcatcacctatgaagcttttttacttacccaacttcagcttggaccatacctaatcacatgcacttactccttacacaatttttcttcttcttcgtcgtcacattcacaatatatctgtttcacaattactaggctatcatcatcgtactctagtatttggcatctcacatagtttaaatatatttatatcaagtattcagctgatagaaagttataagttagatactgtatttaacgttttcactaaaacagaaaatgagccattgatggtaatcagtaaagcccaaatggcgcttcaaacccatattatagttgag

SEQ ID NO: 29477 - DNA, 650 bp, Arabidopsis thaliana columbia
tatattactcagattcggttacaaaaagacataattcaacaaaaccccgaaaattatttttaaaatgagaaaataataataacagctgaaatgatttatatttcttctaaaacgttgtacatgcatgcactcaccgtgaaatgtgaaataaatttatttcaatcttttgatactatgcagtcaatgatatttttttccttataaccccaaccgttgcatccagacgtagcatatagaagaaggaaaaaaaaaaaggaatttcgtttctcttggtgttaaaaggagtgggaagaaaagagattagagcgacggcctccatgagtacttcggcgggatttgtgctcaatgctaatgcgcttgcgtataatccaaatccggacttacgttctctgtttgtcaccttctccaacgggtttcctctcacagaataccaaatcttctgttacttcaactggcaagtgtaacctaactcataaaatctattaaatggatgatagtttttggttatgtagtgcaaatgatttgtcacaaggcgattttcactatcgtgaaacttactttaccttgcatcttagaaggttggctatgtgtagtagaaagtagcacacgtctacgaagtctatagattgataaagatcttagtttagttt

SEQ ID NO: 29478 - DNA, 434 bp, Arabidopsis thaliana columbia
tgcatgatttgaagctgaaattcacttaaaaaattatagaatgataatcttaacccttacaaacaaatttgagattatatctaatcaaggcaataaaaaaataagcaaggtgcagtaggagggattagaagtttcaaatccgatttttatacatgaaaaatgacgaaatctaataatcttggtgacattttctcacagagaaatcggacaactaaaatgagtaaaaaaaattaaaagaacgaataaaaaatcaactgagatatatataaaaaaaaaactggaagaagaagaaggaccgcgagctttggatcgaatttgttaaatttttcttctctcgataataaaaacaacaaatgatcgttgatcgtttttctctagattcgattccgattccaaagaactagtctccggcgtgtaatctctgatcgttgaag

SEQ ID NO: 29479 - DNA, 587 bp, Arabidopsis thaliana columbia
atccccacaaacacacatgtttgtgcaatcaatctcaggctataatgatgatcatctgaccatgctcaagatttttgtaccacacagaaaacatatatagaaaaccttaaaagtaggatgacctctaaagagaaataaagaacaagaggataaacaacatgtacaattaaacccctaaatatagctagagagagcagaaacaaaaaaaagaagagaataattaatactttcttcttttcttcaactcacaacacaatctctctctttccctctatggcttgactctttaggggaaatacctagcaggagggaatggaaaatataaccaaaacttttcagtacggaggagttgattggctttgcgagccatgggtaggtgcaggctctttggggattggccggggagagaatccgctcaagtttgctcttcctcttcttctccttcagatttctgtcttttccatattttccgtatcttttcagtttcttcttcggccttttggaaaatttgcattcctcactcagatgctggtatacgtttccatatctaagcatctataattggaagctttctaagtggaaaatat

SEQ ID NO: 29480 - DNA, 641 bp, Arabidopsis thaliana columbia
  unsure (1)..(641): unsure at all n locations
ttctctcacgtgcttcttgttgtcacttatcaccgagagacgtttcagagaaattatgaatgtgcaagcgaacaagtatgtagtatgtatgaatgtatgtatgtgtggatgcatcatgcattatgcatgaatgtgctaaaaaagagcttcagtggcatgtgctaatgaggctttgatatgaatacaatgcaacatggaacatagcatggatatcaaatgcagtaacagaataaaaaatactataattcagtggcatgttgtcaagatgcacagccccacgacaaaaattagcagccaaggtacattctctcacgtgcttcttgttgtcacttatcaccgagagacgtttcagagaaattatgaatgtgcaagcgacgaagtatgtagtatgtatgaatgtatgtatgtgtggatgcatcatgcattatgcatgaatgtgctaaaaaagagcttcagtggcatgtgctaatgaggctttgatatgaatacaatgcaacatagcatggatatcaaatgcagtaacagaataaaaaatactataatttaacaagcagaagagatgcgtaaggcagatatcccagcaatgttgtcagattccagcccacgacacnaatgagcagcaaggtacattctacacgtgc

SEQ ID NO: 29481 - DNA, 445 bp, Arabidopsis thaliana columbia
taaacacaacaatataaacaaattaagtctaatacggtaaacctttttggaagagataagcaaaacagcacaccagcatgtgtcacctcctaagaaaagcaaagacacgaataaaggaaaagcgctagatccccggaagaaatagatcaccgacatcgttctccaatatcatagaactccaaaccagtaaacccgaaattcgtcatcaattgaagccacaacgttttacgtaagaactctagaatcttcatccttcaaacaacaaattttcagaaactcaaattggactagagtttccaccgttaaacaagggaaattaaaataaaatccatctacccaaaaaacattaataaaatcgatacaaaattaaattgcaggagaaaataagagctacatatagatcacatcggatctaaaatgtaccagattcgccaaagagatgaac

SEQ ID NO: 29482 - DNA, 815 bp, Arabidopsis thaliana columbia
ccatgcggtatgagaaatcggatccatcggtaccactgggtctacccgccgtcgcttcctctgctgcatcttcgccggcgaaattggaagtatgcgtttgtatttgatcggagattgaaagagggaggtgttagtagggtgttagggtatagtcaacaaagtttattagatttttgttgtttttatttttcgataggatttagcatttaaccgaactaaaccgaaccaaacccaaactaaaccgagctaaatcctttagctaaagattacggcctaacatttttttgaataactatacttattcttactttttctttttgttaaaaactatacttaattcattctcttttttttttatcattcaaatttttgttttcattattttttttttttttaatatcaagtataacatatgtaaaacatgatatataatctaaccgaataaattgattttttttatgttagaatttatatatattactatctcttcgatgaataaagatcattctcgtcatcaaaacagttgtttccaataatagtcaaaaaaaaaaaaaaagttgtttccaatagtcttagatcagaaatacagtatgagatttccatcataaaataagcaagaaaacatgatgaaagatgtacgagaaatgtggtgattgcgtgagagtgtgtgcatggacactcgaaggatcacttgggtcatttttttacgtattaattagagaagacgaacatgccatctttctcgacaagttgaatattgttcataacaaattaaaattatataattctcaaaatgcatatagtatataagttat

SEQ ID NO: 29483 - DNA, 568 bp, Arabidopsis thaliana columbia
ttggttcttaaaaaaaatgttgatttggtttgaattccacaggtgattttggtttgagtcggttcagagtggatattctgcctctaaccggtgggcttaattgtcttctccgtttattgaatcccctggacgttagtttgagcttactttattgggcctatggtatatatacacaaatggcgaagccatggtaagtccagcgattgaacactctagtctagtgtttgaaattatgaacaaacaaacattaatacactctgtcttagatcatagtattttccctgtcgcttgatgaacagccatagctgcttattatccatggatggatgacacaatgtttatcgttcatcctatctggctctatctccattgcataactttctccacattgtgccacctgaaactgttggaactcatttttgcgcggtcctacagaaaccacaaatatgccattagaaactcgagatttctcaaaaggttcattctcgagagcaaatggaattgcagtttctgtctgatgagcttgagttggcatcacagacgtgctgaaccccaggcgtgatgtgag

SEQ ID NO: 29484 - DNA, 438 bp, Arabidopsis thaliana columbia
cgtttcttttggacttgtaacaaaagtataacttgaagctaaataatttttttgtgtctattttcttctttaatcattaaaccgtacaaatcgagaatataaaatacaagtttacgccaagacctacccacataagccatggaagtaacaaatgggagagtcttgttctctccggcgatgtctgaaatcaaacgccgacgacgttttattgttctgaatcttcttcatccttcaaattatcaacgatagtcatctctttcacagaatccaaaacacacattgttgaatggttttgcccatgttataactcacatgtggctggagaaattctaggcccttgtatttcatagtgggcctaataagtaaagcccattactagataaccaaccttttgagttttgacgggttattactaataattttcgtcgcactaatgaa

SEQ ID NO: 29485 - DNA, 553 bp, Arabidopsis thaliana
ttattaattttagttttgttgcaattctagataattaagtatctttccttttttgatttttgttgatcaacagttttgcttgtgaataacttgccttgttgggtatggccactgaggcgtttgtgaaacccgttgtaccaaatggtcatgacgggtacgaagatgaagatgaagatgacattcctttggtttttaagagaaacagtaatacagcagctacaacaaatcgtcctagccctattaataatgctatgagaaactcggctattggttccaccaagtcctcaccaccaatgaggtctcctttaacaagcccgaataggtcagcttcttcatccactagaagttcaatgatgaaaccagcattaccgtcatcttcatctgttcaacgttcgactctgaagtcaccgttgcgagatgatagatctgttgttgctaaggagaggaacggttttgggaaagctccttctgtgtctaaaagtgatgatgaggattctgaggatgataaacattgagtgctaggcttaaattggattctaaagaggttacaaac

SEQ ID NO: 29486 - DNA, 651 bp, Arabidopsis thaliana columbia
tgaagaggaactttattagccagaacagagtaagctgctttgcgtactgattcattaacatcgagcgtgcaatcaataattgcttgggtggttgcatttgaaggaggcagagataaaacaattgttttgcgtacctcctgtaaacaataaaaacatcaacaataagactttggcaagcattgatgacaaatatcagaatgtaatttatgatgtcaaagcagaaatggtaaaagatagaaactttaccggattctgttccaaaggaagcacctcaagtagcaaatcaagaatgtcactattctcaggatcattcacaaaacgtgaaagagacctcacagcaaatgtacgtataacaggaactttgtcccgaactcgcaacatcatacaatcaattacatcatcccatagttcatccgctacttccacttcatctggcagcctcaatatgatctgtaacaaacacaatgaacagttgaattaaacctatatttgacctaacagacatttaccgattaaattgaaggagaaagaaccctaattattctcttatacctctgaaattatctgacacgccctgaatctcgcgtttctattggcagcaacagacccagcaaccaaaaacttaagaaattcctctagaaactcgtcgca

SEQ ID NO: 29487 - DNA, 473 bp, Arabidopsis thaliana columbia
tctatcccgggccgatttaaaaccgaaccaaaatccaatcttagtcataatcttcttgataacaacaatttcagacatcaagcagaattagattcagaggagtgtacttggttcttcgaaagtcctgcttgagacgccaacaccagcttctctgcttcattcggagaactcttttcattctagcaatcaagctaatgatattactccaacattgtaactttgattcatcactagtgtaattacacttgaagcacaagactactaaccgggtgcaagaaatctctgaaagagccaagctctgagaatagcaacggtagtctcaggcaagcctctgatgggtttcaagcatgtctcagtagtccttgaaccctaccgcgtcgctgaagtgatgatgaagtggtgtcccatcgatcaagctgagctgtgataagccagagctgatgatcttgggaacatattgatgagaaatgatg

SEQ ID NO: 29488 - DNA, 1154 bp, Arabidopsis thaliana columbia
gataagtatgtttatgttaagtataagtatgtatgtatgatgattacgtatgtttgtatgaacgactggggagaatcgagctgtgggtcgtggtctccctataatgtggacagtgatgggccgacgtgttacatgctggtcaagaaaggctgacgagcccgggatgcatgggagtgtctgagccacgagggccagcctccactcatgaggttctagttgtcacgaggataactggacctaaagatacgtatgcatgtgctatttatggatttatggataagttgattattataaatgtgttattaatagttaaagcatgttaggttgattgcttgtgtctaagtttatatgttatgatgatggttgtacagctttagaaagtgttctatgtttcagtgagcaaagttgattcccctcactgagtattctttactcaccccttttttcccctttgttctcaggttactaagcgtgatgagttagttatgtgcaatattttgttcgtgtaagaagtttaaagaaaatggtttggcaagatcagataaataacatgtcgttttggcatatatggcgggacgggtgttacatcaggcatccatttgaaagtcttttagacgctcgatgcctatggtcgaacttccacattagccagcgaaaaccgcatagatgccaacgaatccagaagggatctaacctatcttaactacctgactatcctagagattaccctaatctaatccatcctcaagaaccctaatccctactcaagcaacatactcaagaacacaaacccagaaattactgaaatcatactaaaatgtagatgtaaacaagctaaacaactctactcaaagaactaaatgcaaaaacgaaatagattaagaataattaaggttttaagattcaagaatacgaagaaaaactaagagataaaagctagatcctttggacaaacccaaaagtgatctatttatactaaaatgttgaaaaccctagattcactagaagacaaaagaattgaggcggtttggacgattgcttgatcttgaggattgagttatcactcggtgtcatcaaacaagctaacattcaagatccttctagaatcattcatgtactataacatgataaatcgaccattctttttatatata

SEQ ID NO: 29489 - DNA, 957 bp, Arabidopsis thaliana columbia
tgtgctctaaagtcacacaagcgatgtgggacaaaatagacgcacaccattatactccagttttgggcctcaaaatatgggcctcggaaacacttgctacttaattatccgctttatcgggttctcttcatttgttttcactattaaagatgtttaattttttgtcaatgataccttaattggtactttaaacattgaattgactcaagtacagtatcatcaactctgtgtttagattaagcgcgtgacttcatttccaatacaaaaaaaaagaacaattactattcaacgatgcattgaatgcagaatctggaactaatggaaacagatttaacacagaaacaaatctaagaaaaaaacttgcctattaattaatgagattacaacaacgtagcgttgaacagtttcagatttgaccaatgaacccctgttccctcttaatagcatcaaatctccaagaattggtttaaaattaaagaattctgagtttgttttcatgcagtagagttgtttggagagcaaaagtctgagaggacatgccaaacccattgcagaaatcgctgcatggttacctgtcaaagatcaaaaaagagacagggaagctgcaactgtcttcctcacattcattctcatcctcaaagaattgggtgcttggtaagcatcccaagaagctctccttctccttcaagcacagacgacgcagcagcaagaccagattcagcaaagaagaacccgtttaccaccaggactctgctcacgccgccaccttgtccgacattgatcgttttcttgaggaaaacttcaaatccctctgcatcagagacgaccaggaggatgatcagcatcaagcccgggtgaccaaaaacaaggagaaaagggagtcatcatcagacgacagtgatgatgatgatgatgacgacgactatcgtcacagattcgagaggacatggggacatg

SEQ ID NO: 29490 - DNA, 1215 bp, Arabidopsis thaliana columbia
ctaaagattagcccagaaacttaggatacacaagatataagatacaatttgctaaatgcatgaaactcaagaagaacgaagaccaaagtgtggacactttgccccttcttagaattgggaacaaaacacccatggaaggagttacagagacaaagtttggagctgtgacaaaaggatggaccatctagagactgccatatccggggatccatcccataatcagcttccaaacgctgacaccattgcacacactagcaagattttgctgtaaggacccagatatagctttctcttgtgagactatgccggggcctagcaaacacattttagaccgtgaggccaaacttggcatgtgataccttttcggaaagcccaaagacagccctccgacgaaagaagcaggacaatggaacatttccattgactttttgtcgaccccaaattttgacctttaagtactttttcgggcattttcgtgatttgggctatattacggacccaaaattacttgttcaagcattgttttcgaattttttcatgcatcaaagctcgttaagactagatggggtatccctacatagcgggtgggacccacggtgaatggttcatcaagtcttcaaaaaagaatatatatgattgcattgcatatactaacggatgcgatcataccagcactaatgcaccggatcccatcagaactccgcagttaagcgtgcttgggcgagagtagtactaggatgggtgacctcccgtgaagtcctcgtgttgcatccctctttttcgtttttttttttttttttttttttttaaatgtatgactctagaacttttagaccgtgagcccaaacttggcatgtgataccttttcggaaagcccaaagagagctctcgatgaatgaggaaggaaaatggaattcttctattgtttttttttctactccaaattttgatcttaatgtactttttcgtgcatttcgtgatctttgctatattacggggcgaaaattatatgttcggacattgttttcgaatatttttcatgtatcaaagctgttataaataagatagggtattcctacatagctggtgtgacatacgtcaaatcgatcgtataattatacccgtagagcgcatggagagctgattgcctggagtcctcgagggtatactaccgaccagataatgtaccagatcccatcaaaactgtgcagttaa

SEQ ID NO: 29491 - DNA, 911 bp, Arabidopsis thaliana columbia
ccccggtcaaaccctccactaataatacatatttaatttttaaaacaacacataaatcttagtatatgaaattaggtttttcaaattggtgattcacatttatatctctcactgtttgataaaatagtatgcgccaatttaaatacgaactattttctatggtgataatgtttgaattgcttaaaaagtattttggttattgagtaaatctcattagatattagattgaaaacaatctcatgaatttgtttgttataactagacgagcctgactatggatttgtgaaattataggtttctttgtattctcaagctgtttaatacatgtgtgtcctttagctgatgtttagcgcaggacaaactctcgactttgttgacttttctgattaattgccaaaaaactgacttgctaaaaaacatattaatctgatatttgaatgattttttgattgcatgttgctcagaaaagcatattcatggaatttatattgaaagacataataatatcgtttacttataaagaaaaagaaagacaattccaaactatgtaacgtgctagttgttcatatttgtaggtggaatatggaaaggggccctgaatgtagaattctcaccaatgatgcgtgaatcatccaaaaagacaaatccggcttggtcgacatcgtagattatgacctggttagagcggagagcgggagggtttccttgttcgtcaagcttgaacaccatttagcttatattatcattttcgcaacaccgttgatgatctgggcggtcttgtaccacttaactaaggaaatttcaccaccagtggatcgtgattccaccaagttgatataaattgttacaactataaatctataatctatggaaactgaatgagttgcacactgtcacactgagtcaagatg

SEQ ID NO: 29492 - DNA, 994 bp, Arabidopsis thaliana columbia
cggtttataattcatccagtaatctgtaatgtactcatatactacccaatgataaaagggcatatccgccgcatatgtgtttcttttttggtcgaaaaattatttgtcctaattaatcatgatgatcaatgtaccactaatatagatatctatatatacattttttcagccattttgtgaaataaatcttatagttgagacttatttacaatggttgccactgaattttaatatttgtttttgataattagaaatataatcttctaattaaatatttgatatttaacaatcatctcaaaatctttcgactttaactacacgattaattactaaaataaaatttctaaaatatttaatatcatttaattactacaaaattatcatttttgatattgcttttctgcatgattatactaatttgattataatcatcaaaccgtgccgagaaatttgatagcatttaattactacaaatttacaaaatatttagacaataattcataaacatatcataaataagatcaatcttaataaaataaatgagtttttttaccggacgggttggcgggacgggtttggcaagacattacttaataacaattgtaaactataaaataaaaacattttataaatatgtacaatttgcaaacttttatatatattaatttaaaaaataaattgtttccgcggtgtaccgcgggttaaaatctagtacatatatatgaaacgtgtatataaatggaagggacatgaagaagaaggatgggacaagatgttgaaactttatataagaatgggtaacatcttaacatggctcactcatcaactctttcttcttcttattattgttctttttcccactatttttggctttgttgtttttgtaataacccttttcatgtgcacccactttgtttgaacgttaataatttgaaacgaattagttgattatcaaaaatatgagattaagttgattgtgattgctaagaaaaat

SEQ ID NO: 29493 - DNA, 516 bp, Arabidopsis thaliana columbia
ttgacctcacaattcactattgtattgtatacgtacatttcaagcgtaattaaaccctcatatttttatacgctttaaatataattggcctttaattagctcaaataaactagatgtcgtacgtgatcacggtggatgaaatcaatggtattatgaaaagactgtacatgatttcaaatattttaatgtggtcgtaaaaattgttgtttatagtggaaattgaagacaacaacgttactgaaacacatacagattgaaatttcgatcatttacttgcaaagtgttaccgtggaggcgtggcgtggacgtaaggtaccataatggtttgtgttacagtcacgccactacactcgaattcaagctaccatattataatacgttgttgattagaaaaaatagtcgccaattttctttaaaacaaatttcagtttttatttgtcagcaaaaaaaacttactaacacaacggaagaacacaaaaattagggagttctcacagagcaaaagtaatagaaatg

SEQ ID NO: 29494 - DNA, 938 bp, Arabidopsis thaliana columbia
tcccctattactagatgtcatgtgtaagagcaggtatgacaactagaaccgcaatcggattttaaaagccaaggtattaaatctttgttagaagatacaaagacaaagactcatacgaacttataataggtttttagtcaattatcctaaaacaccaatcatgtcgttgtagtattttaggtgtcaatccaaatgagtgtgatgcaaacagatgagatgtgatcagaagtcactaagtcaagccaagcaataacagttttggggtttttaaaagtcctaagtgaacatgtagaaaacagaaacaataacagaattactaaaatcacttgacaacaacaggctgatgccagaagtaggatgtggtcgagtaacaggcaggatatgaaacagatatactcgacagcacagtctgttgccagacactgggtgtggtcgagtatactggtcgagtaacagacaggaaatgagacaactgtactcgactgcacagtctgttgccagacactgggtgtggtcgagtaagttggtcgagtaagttggtcgagtaattgcaaaaactaagaaacaggcaatgagaacgattaagcgataacgataaaacagagaaatcagatagacgagaaattcctaaggatggggtaatcaaataaagtggtatcctagcctattcgaatggttaacaagcgcaatcaagctatccctagacaacaggttcaacaacagatcaattcactccagtgatagaaatcctcaatcaaagctagcccagactaattcccattaacggaatctaactatgcaggcaataagaacagactgataaagtcaataaacgctctaaacggccaatcccttgggatagagacgaatatctcaggaactagtggatcaaacattccatcgaacatcttctgggtgcgggaatgcttgggatcgaa

SEQ ID NO: 29495 - DNA, 581 bp, Arabidopsis thaliana columbia
  unsure (1)..(581): unsure at all n locations
cgactctatcctattgtaactatttcctaaaatctcgtattcaatcccaacaattactcattcctggttacaattttcctttcacacaaatattttttatacactctcatagcttgaaaaacctaactctctcttaacttctttttttcccatcattgcatagagattatggagtgtattgtggatgatgtatcggatagtacatgtatggtgacgccaatctattattcgaaagaaacaactcaagatcgtcagacttttttgtttgattttgaagttgtctacacaaaagtgcctgagccaaatagtgatggagaatctgactacatgtccagtaaggttaaaacaaggactacaaatcaacttcaaagatatggtcgagacgagttcattggtcaagatgaagaacaaatcaaagccacaatctacgaaatcctcaatgatgttggtgtcctccgtatctagggatcatgaaaacatttgctgaagaaattcaaagcatattgaattcacctctggagaaattggagaagataaagtanagattgaagttgttcacacatgtttcatgaagatgatga

SEQ ID NO: 29496 - DNA, 320 bp, Arabidopsis thaliana columbia
cggtaccggcaattttttccattgtctcatgacggatcagctcagcatttaatctttgatttctcagtcgcatgaggtttgatctttctttacatcttaagtccgtcgttctccaccactattttttgaagacggaattaaatggatcaaagacccgtactgtctcaacaaggtatgtaccacttgtaattcatttggcttttcaagcttccttttgctccatatggaaaggaaaaaactgttaacttcacccctaaaaacctgtaattctggcagaaccgggctaatccttaaaatacataggctcagaaatttacgga

SEQ ID NO: 29497 - DNA, 443 bp, Arabidopsis thaliana columbia
ctatctttctctcactgtcttctacttcttttgattttaaccttttttcagtagcaagccaaaaaaagaaacatgcaagaagtccttttatgaaaaaggtaagttggtatgtcgaatgcgtcggtgaatgacacacctttagtggagaatcagagggcccaccagcaaccagagatccatcatgagatatagatgaacagtttaacctgggggagaatagaagagtgagtaacaaggttgcaaataagtagttaaaattaggaggagaggtggacattacctgttatgagtattcacaaatgtataaaagctgactgatggcattgcagcactactcaactgcgcacggtgtctaaggtcttcaaggatggattggttacagtagtggacctgcagagaaaacaaggagatggagcaaaattgatttactgttaatgaggttg

SEQ ID NO: 29498 - DNA, 619 bp, Arabidopsis thaliana columbia
ctaagatggtgaaatgaataagatggtttactttatggaactttggtcaattaaactatcatgctttatgtgaatccaaaagcataataaaagaaagatagaaacatatcaaagcttgagagaagaaaacaaaagagtatatatatcttctcatcaaatcaaattaacaaaagaccccaccaaattaagattaaaagccaaacactaaaagtaccataagaacccaaaatcaaaatatctttctctctttcttcttcatactacaatgtcaacaactcctttttaccatcattacctcctaatttaataagtcttatttttttgtcttttttttttttaaagttaaaaagattacttgcttgcatatatacgtctcttagactctttcttcttcttcgttaggtggcaactcattcaagtcaaactccaaaactcttctcttcaatttcttcacctcttgtactgtctctgttacttgactagaagacgcagttgctggaacggttggagcagcggttggaaccgtggttggagccacagtagaaactggtgcagccaatgacactcttgtgccaccaagagcttgactgttgagaacttttgtgcatatattcaacat

SEQ ID NO: 29499 - DNA, 568 bp, Arabidopsis thaliana columbia
ttgttacatctttattgggttttcatttttggaagctatttttatgaatttgcagtgttgttgttgcccaaaagaaaaaaagcataattccaagtatatctttcattttgaatccatcagtcatatgttttacttgaatcaactatttgttgggttttacgaagttacttgttaagaagattcaaaatatatataattagactatcaaaggaacaaaagaatgtaattgggtcataactttttccgaagcttacgtgacttgggagaaaatcaaacccattagtttcacccttaatcaaactaatcacaaattttgaactttgcaaagaaggtaaaataataatcagcaaaaagattaataaaatgacaaaagtatctctttaaaagattaataaagaaataaagaaatgacataagctctcaccgaccgacgtcttgtcttttttattcttaaggtcggtgccatgtcgacgccttcaagcttagaatctcgccacgtgtgggataaactaaccgaacccaatcgaaccagacagaccaaagacagaccagaccggactagttgtat

SEQ ID NO: 29500 - DNA, 595 bp, Arabidopsis thaliana columbia
acacagagatacagaatcaattaataacgacaataataatcatcaaactcgtccaaatagcattggagatattatgtcggcaagtgcagcaatcaaacaacagatcatccaaattgaagaagaaatcaaatcaatagccaaaaatatcaatcctgagaaaatttcccgataaacaaatggatcgcaacaatatctaccagcagaggaaacctaaaccttttccgcataaaacaaaattatacacaaaaaaaaagtagagcataccgccatggatgttgatcttcgaagtcgcgcagagagagagatatgtaatttgttgcttttgtcacgcagattcagagattggcctgaaaaccgaaacgtacttcgagatcgatgatgcgtagatagatagagagggaagagtgtattttgctttatatgacacctcacactcaacgtgtgggtttgcgttacgcctttaatcctattttagtcctaattgtttccacaattaatatttcacttttttagtatatattctatttttccctcttcagtcaaaacaagagttaggagtttcgtacacaattattaagtgtatgttttattagaa

SEQ ID NO: 29501 - DNA, 474 bp, Arabidopsis thaliana columbia
ttgttctcttcaaacagaagatgagctcaacgagaacagaaatctcgtgtggaacaaaagggtaaaagctcgtttgattcagcattatccattcgaattcttgtaacgatatgatgaaagtacactaagattgacatttcaacctcaacaactttctacttgcttagaagtcttcatgacccctaacagccttttccaataggatgccaaaagttagtattaaaaaatcccccggacataaaggaacaccattgcttgagatcctccaagtttagaaacctcctaaatctgctcctatgaaatcgtgatttcaaacaatttgtactataaaggaaaaagtggaattttacaagagagatcgttctcctcctcgtcatgaacaccttcatcaatgtttaagaacatctttcttctaaaccaagcaatatctatttatggataaaagaagggaggcatgctctctaatttttttat

SEQ ID NO: 29502 - DNA, 544 bp, Arabidopsis thaliana columbia
ggcattgtaaataaaaaaccgaagagaattagtagcagaaatattgataaattatcagagctagagaagattattattgtttgagctgtgtactatatatataaaacaaagctggctgtgttatctctgttttccattaccggagcatgtgcaatatcccaatgtaacaattacatgaaaacatatatatatatatatatatagaacatttgaaccaaaacggatcgtttagctcccaatttctttataaagcttcttatcaattcctatcgattgttaaccagatgcaaacaacgaaagtgtttttccatctaatcgaaattgacgaaacccgttggttaaccagaaatctagccggttaatctaagctatgtagtaataaatcatcatgtaacaggccatagttaccctaattttatgggccttcaaattcagccgatcatcatgttgaccaataaaagcttaacggattagagttttttgctcttctcatgtaatcaaatccctgcagaaaaagcacaaaaatcataaaaccctagcaatg

SEQ ID NO: 29503 - DNA, 442 bp, Arabidopsis thaliana columbia
ccccgaaatttgttttttctttattattagataaatagtataatatttatattccctattgatcaactgttacgtttattgactattttatcatacataccaaaaaaaacatgaatatctcgtaaaaatttgtggaaaattgaatgtgcaatgaagaaatgagtttgaaaaggtcgtgtgacataagtataatacaaattactcgataagaaaacggaaggaagtttcgtcgggctaacaagcattgcttcgtgctcactgtagaaagctcttgttgagctaatgatgagtttcaaattcccttatatataactttgtctgtgcctagtaaacaaacatttctctgtaaagacgtactagttgatgtaatatatttaaccttttacgtataatagcataaagtttcatcgtagtaagtggaaacactgacgagtgaggagtc

SEQ ID NO: 29504 - DNA, 836 bp, Arabidopsis thaliana columbia
ttttaattgataaaacccaatgggcttgggccgaagcctacaaacaaaaacgatccagttacaaaatgggaaatcggcatctcgctggaaaacgaaaaaaagatcgccgcctgttgaccgtcgctagcagagcgactaaagctttagttccggcggactcaagacccaccgctttgtggccgcctcggaaaattgaccaaaccgacgaaagattccggttttcgtcagaaaagtctcaactctgacgcaccaacccaccacaagtctcccggaaagctagtcactccgacgtagcggttccacggaaacggatcccgacctagcaacccaaatcactcagcaggaaaacacttcactcccctcaccggaaaaagccaaagacctagagccaacacaaatcgattcggacctgtggagaccaaaagcggcagacctaaagactggtggctcaaccagaccctctagatccaaaacccgcaatgtccatctaagatccctacagatctaccgctaaccactgaattgcacaacgaaacccaccttactctctccaacttccgctgtggaagcagcgactagatcaacggatgagcctgagaaactcgccgcgtctctcagcgtccacaaccgagagaccaccgctgcaaagcttctctaccgtccgaactagagccaaaaccacatcagagagggagcaccacaccacacgttgacggagacaagcatcggctcactcttggaccactttgaagaggtttcgagccgacaatgaagagcagatcggactggaaaggaaactaaatctggttaccggaaattgtcttcaagagagagag

SEQ ID NO: 29505 - DNA, 685 bp, Arabidopsis thaliana columbia
agaggaaaaagagaagtatgagaggcgaaagaattatgctttcgaggacgggaacaaaaaaaaaaaccaacacaatcagagatgttctagtcaagtgttcgtcgaatgttacgtggcagcatgaatgtcccgtgtgtatgcataaaatgatgtataaattaggtatgtgcacgtattctatgtgacagaaattgtatccaatatttaataatcatctacgagtaacttaaatggtcaaatgcaaagacctcaacgtaaagaaaatactcaactgaaatagttaatttttaccaatttgttagaccggcctttccacatactgtggctcagtgaattgatctttatcgcaaaaaactgcaagaaccattttaggataagtaaaggggtaagtaaaatattaatatcaggtcgacaaggttccatgaaaggttagaccaaaaagtatgactaattgactatcttgtcaggatagccaagtaaaaaataattatttcactccctccaaagctggagtaaaaagagtctataaatagtaaaattaagatttccattcatttctttttttcctcaacggataatacaaatttcattcttctaatttactaagcatcaccacctataattttatattacatatatctacactcagctaaagattaaccaaaaaaaaaaaaaaggttggaat

SEQ ID NO: 29506 - DNA, 354 bp, Arabidopsis thaliana columbia
tatgatagagaaatatcataggtatatatctagtaaattcgtaagattaccactgattaaacaacaacaaaaattacttcagaaccgactctatttctgcttaaccacctccataccaaacaacgaaattgatttttcctggagaagaaattagacccggactcaagctttattcgggtcgggttataaaacttttataaatgccctcacaatctcgtcttggtcgcttcgcaattttcttctaatatgtggtattacttattttattcctccgatttgagagtttgcatagctcgggacttctctccgacatcgtaccgtctcgtccgagtgagctgagctacttaccggcga

SEQ ID NO: 29507 - DNA, 517 bp, Arabidopsis thaliana columbia
gttataagtaacagtatcgatgctgattactctatttctaagtaaactaattgcaaaactcaaacgacccactttgcaaaaagaatgaatcaatacattgagagcaaaaacatcgggagacactccacaagctatcatcttgctgtaaatcagcgatacctgatcgtgtaccaaaccattgacattgaattgatgaatcagactgttccatagacgcgaatccggaacaaccccgaaagtgcacatcgcagagagcgtccttgctgctccgtagagtctctcacagcttaaatagagccgaaagagagtatggaagagagagacgtaaactctagtcttgataggagctaaatctgggtcgaatcttcgttgtgtgatcgagaggctagtctcttcgctttctgggatttggggtcgtttgattgacgagaaagagcggcaatttgagaggaagaatctgtatttacccttatagttatccaaatccttatcattatcatcagcagatagattggag

SEQ ID NO: 29508 - DNA, 368 bp, Arabidopsis thaliana columbia
taagaactgcatctacttatcagataacaaaggcattggctgtttagaaagttcaaaagagtagaacacatattaataataatatcattttcaataaagttttcaagtaagccatggtcaatgtttaagagagcggtaacttgactccattccaaagtctacaatatactccttttacaaatccaaaattataactccatgagatatgcatcagccaggaaattaacatcttacgcatgcattcagaattatatatatgtatgatcgagatttattaaccaagataccctttctgatggaatatcggttgttgacttgattcactacagccagactgaactgtgaatatctgctcacccgtacggcaa

SEQ ID NO: 29509 - DNA, 366 bp, Arabidopsis thaliana columbia
tatcacctcttgtagatgcagagaagactattttcaacatttgttggcttctaatttgacaaaatccaaacataaatcagattctacaggaagccaagactattttccaaacatttttagtgctccactatcaaaacctcgttactgacatcatctctttatatatccagaaaacaggaaccccaaattgttaaagagaatatataccaggatcagattctacaggaagccaagacatggttcaacgatgactcgcgccggtgaaaatgggtctgaatttagaattttcactctcaaattcgcgcttatctatctcctcccatcgatttcatcgtcttcacgctagctgcagactcgaaagagaga

SEQ ID NO: 29510 - DNA, 546 bp, Arabidopsis thaliana columbia
ttcatgatttgcacgcctcagttttgtgattatgcgtttatatgaacaataatatgatttgttacttttctggttttacctattattcagttcatttttgcgtgcaatttatttttaaatactaaaatagtctgatttttcatgacttatatacttaaaaaaatacttataattattaattaagtatgaatgtaaaagtttgtatacatttaagtaaaaaaatattttggctgttcaaaattttaacgcaacattttttttgttgttttggtattccaaaacattaattaagtaatcaaattatttgtagtttttttacttaattattaatcaaatatttaacacgaaactgttgataaggtgcatgagtattagtgtattacatctctatataactattagatttaggtgtacttagtattcatctaattcattcatttgacagaaataattaatatttcactgaattttgatgagttggcactctattggagagtgattttcttggcatcatatgtgatgtgactatatgagattttaattttt

SEQ ID NO: 29511 - DNA, 520 bp, Arabidopsis thaliana columbia
tggcaacagattgtgcagtcgagtatctgtgttgtaattcctgtctgtaactcgacctgtcactcgacctcacccagtgctctgcaaagagctatgttggtcgagtattttattgcttgaatttctattttctgcatgttcacttaggactgctagaacacaccaaaacctgttattgtttggcttgacttagtgacttctgatcacatcttgattattagcatcacacccatttggattgataacctaaaatactacaacgacgtgagtggtgttttaggataattgattaaaaacctattatcagtaatcttgaatgtgataaatgcatgcaggtgattgaaaatctttaataggagctgccattgtgtgttgattgggtatcaagtactttttctaagtgatccaaatccttctctttttcgcagttccaactctttggaaagattgtaggaaaaatctatttgctctatatgttaagtcttgttgtgagtaattgttctctctgcggttttaggtt

SEQ ID NO: 29512 - DNA, 634 bp, Arabidopsis thaliana columbia
atttagtgatgaaattagatttgtagtaaatcgataactgaaccgagttttggttattgcttgtaggtttatcaagacattggattgaaggataaggaaaggtatcagagggagttgaatgagtacagagaaacgttgagacttaggagatggtgacatgacaaacggcaaggcagtttaggtgatttagttacaacggcaagtcgttttgttgtaggtcgtttctctcttttaagattggacgcctcgccgtgtctctgattttctagcttattgtagttgtccatgcttgcttaactaggctcagtgagaggctagacttgccaaacttgaagagtctttatttatttaagaattttagatgttctaatgtattaatcctttttcgtaaacctttcctgttaaacaagaggtttatgttgcatgttaaaaaagaggtttaggttatattagcaatttagcattcgattcgttggttagtaactaagtaatataaataccacaagaacaagaaatactaatgaaaacttggaatgttcaaagtctccttatctacttatgcaacgttagacaaagctatcaaacaatgccacgtcacctcacaaaacatctagggtaaccaatcacatgcagg

SEQ ID NO: 29513 - DNA, 492 bp, Arabidopsis thaliana columbia
agagaggtaagagaaatagaaaggagcgataaataagaaaataaatatagagggtaaattagtaatttcaataggaaatgtcgtaggagttaaaaggggattggaaatgtggtagattttataagaaattgaaaaaaatggtaattgatgtaattttcccaattataaagaaaaattcattcaaatgctcttttcatgatgccccttttcaactctaccttttcatgatgccccttctcattatgtagattttttttttttttttttatatcaattggctaaatacagcacatctggttcagctaaactaaaaaaaaaaaaagatgggtgagagaggcgattttagggttccagtgacgagttcgcaagatgcgccaatgatggatatcggagatggtggtcgtcctcgggagacctctggatgtggtagagcatgggcgagtaaggtgccaggtagcaatgctggagggaggttgcaccggagagagtgtt

SEQ ID NO: 29514 - DNA, 827 bp, Arabidopsis thaliana columbia
ttagacaacacttatacccattttgtcctaaaagaggataaaaccaacgaaaaattgcttagaagcagtaaacagctttgttagtgtttctatggtcaaaatgtgtcacaatccaatgcttatgactaattatcagagttagagatgaattaggagtgtttagacaacagttgatgatcggttttttagtcaattaaacctaaagcactatcatgtcgttgtagtactgaaggttgtcaatccaaatgggtgtgatgctaacaatcaagatgtgatctgaaatcactaagtcaagccaagcaataacaggttttggtgtgttctagcagtcctaagtgaacatgcagaaaatagaaattcaagcagaaacaataaaacactcgaccaacacagctccttgcagagcactgggtgaggtcgagtgacaggtcgagtaaaagacagaaaataaaacacagatactcgactgcacagtctgttgcgagacaactgagtggtcgagtatgaggtcgagtaacaagaaagaactgcagaaattaagcgacagataacaagatgcagtaaacaatagtagagtaaacaaagaattcaatcagataaagaattctcgaggatggggtaattgaatagtttcgtttcctcagtttacaggtgattgacatgcttaataaattgaccttagataacaagttcattaaccaaatctaagtaccaccgcaacagagaccctcaagttaacctagtcccagactcaatcaccattgacgagagctaacctaacagccattacaaatcaacaagttaaagctaaaacgctccctacaacc

SEQ ID NO: 29515 - DNA, 1056 bp, Arabidopsis thaliana columbia
ttgagtctagtttcatctatctttcatagcattcaccatcattttcgtacattttgcatctttagtcgagtctaagactagtcttacatacattctttattctggagttgtttcaggtgttttggagctattggtgctcagaaagagggaaaacagaacagaaagtcacacttccaccaaacatactcgatcaccagtagcagagagggaagcagtcagctcagtagtccatccagacacttatactcgatcacagaggagactaggcagtccattctgccagatatactcgaccacagaggggaggaggcagtccattctgcaattctactctatcgcagaggcgaccaggcagtccactttgccagtccaccagttatactcgatcgcagaggagaagaaccagtacatcctgacagttgacacacttactcgatcacagaggccaagaagcagcccagatcattctgtcaaccaacctactcgaccaccacctcaaccctctgatcaatccgcactcaaccagacaacctgagcatcagaaagagaagagaagagaaggcccattcgaagcccattcgaaacccattcgaagcccatcaggaagcccactttgaggcgacactcttgatcacgccgtccatgggccgttaagtgggctcgaagccgctttttatttttgtataaataagtctctaagggtttcgccctgagacatgcactttgtagaaacgaatttcgcactattattcagcagccgcttttcattcctgcaactttgtattttgattttgctttcattgcttggtcatctttcgtttctatgatattgtctttaagcatgttgtctgagtagtgattaggatacctgaggatgggatagaatagttgtggaacccctggtcgaatctgttggttaagtgtagatttattgaatcccttctagattagttgtgtttactgcttattcctttctcatcaactggaatccgatcccagacgttccagcgcccagaaggcgtttatatccggacgaaaaaaatccctctagttact

SEQ ID NO: 29516 - DNA, 587 bp, Arabidopsis thaliana columbia
ttctcattattattatttttttcgggtatcttataatccggatctgatgctcaagaacattgcctgttaatgatttagatgattattatatcacgtcttatattttgaatgtgaaagaaattgatatggttaaaccgagaagagacaacacaaaatcctatacagattagaaattggtgaagtaatctttacagactcacttaatcagatttactcgatataaagacaaatctttgacatgacactaaacaatctctaaaaatctatccaaatgcactgaacactctgttccaccacatagaacaactttcctcacgaacaaaactcacgaaacaatggaatgggtttatcaatgcttcttgattcgttcatgaggctaaaatatgggcttcttacggatggcccaaatgatataagaataaacaaaaaatagagataacggcccaaaataatagtagaaagagagaggagtactaatgacttattcaaatatttattagttgaatttggagtaacgaaaagaatttccaaaggtgagatgatccacatcttttattatgtatgatgagatgacaagtacatataac

SEQ ID NO: 29517 - DNA, 612 bp, Arabidopsis thaliana columbia
agctaaataggatctgaaacgcccatctctcgttacacttgtaggcttgtagcgatcgtatacgcttttgtaaatgaaatagggaaagtcatttgaccaaacctccgaagtaatcgatgaatcttgtctactaaactagattaatataaatagttttttttacataatcagatatatttgataataatcatgttacaaatgaaatctaattagacaataactatgtcctccgtaacccttgtatcggcaaactaattattcttacacgcaacatattcacgagaaaccacgatggatggctctatatgtaatggaactctctaccatccgtcaaattttaatttgcctcatattaatcagattaatgtggaagaaaatacactctgagacaatggaactcagatcttgactagactttcagatggcactcggaagtcccgatttgcttggtttccatatatatttaaacaactttggaatcttgcacggttataaagatttactaaatatcaattcacgagccaaaatcggcaaacttacgagtaaacaagtaaactaattaatacataagagaataaaaacttttgattggaaattgatcatttttttttg

SEQ ID NO: 29518 - DNA, 561 bp, Arabidopsis thaliana columbia
gcaaaaaccttaaaactacaaatattcataaacatagaaggagtatttaacaacagtaggtaaaatggtaacattctgattcgggtaaactgggtttaccttttttcattctttggtacaagggatggtttggcatcctagttaagagataagaaaattaatcatagttatccataattgaaatcgtaatgagaagacttaaattctgatcttttattcaaaatgaatcagtcatccactagaccaccattaattattttgtaagaataaagtttgttacgcatgatttatagtggattcttgggatttcctaacatgatattaggcagttacacttacacatatctactggttaaatcccttatgtaataaaaaaaaatctcgagttcaaaaacttgaggtcttttccaaacattgatttttgggtgatttgcagaaatgatcatgtttgataatctatttagaatatacactttaatatgtaaactaagtaaatacagtagaagggatgaaagtcagtactcttgttaaatatgagatacgccgtgaaagagagaaagt

SEQ ID NO: 29519 - DNA, 547 bp, Arabidopsis thaliana columbia
tacagaacaccaaaatttcatgacccaacttggtttgatattctctaaaatccagcttggttttaagaatctgtagaaccccacttggttcttgtatctttagaacctcgcttggttccaatccaaataccataacccaacttggtttgatattctctaaaacccgacttgcttttaacgtctctagaacccgtctttattctagcatctttagaacccgccttggttccaatccaaatatcataacccggcttggttttagcatctctagaatccgacttgattctagcatctttagaacccggttttgttccaagattgaccaatcatccaccttcttgagatgcggcctgttgatcacacttcttgacccatcatctaactttcttagatgtggtcccgtgatctttgaatgttgttgggcttctcccacatatcattcaaaatcttcattagatgcctagagactccttctcaatgcaacatcaaatgtttattagattcctagagattcctcatgtatgtacatccattgagctctcttgag

SEQ ID NO: 29520 - DNA, 1118 bp, Arabidopsis thaliana columbia
gtctctacggaggagaagatatgcaatggatcaaaaacttcacgagtctctggcgtaatgtagcgaaggccgcaaacattcaacttgagatggtttatgtcgggaaaagaaaccctaagaatggaatccagccgataatcaacacaatccgggaggaaaatctcagccatactttgccggacttgttccagatctggtttttctggaccagggtcgagagcatgtgggaatcgaagcagaggatgctgaaagcccacggaatcaaggggagagaagggtttaaagaagaggaaaaggaccttgttctgcaagaagtggttgctatgttaggttatggaggagaaggagatggatggggactggtgagtaaagcatcggacatgatggttcgagccaaagggaacttgttttctaggggtttggctgaatttaacgaatgggaagtcaacatcccacaaagggttttcttacagcgctcaatgatcatctcttaatgcgtctcccaccacatcactgcacaaggttcatgcttcctgagactgctggaattatacctaatgaggttgagtcaccgagtgccgtaggactatggaaaagtattacttgtaccaatgctgccttgagaagatcccataatactggggacaagttgatttggagccaacaacttgttcctataaaaccaaataagtttgcgtcttttttttcctccttgttgtgagtttctctactcttcatgttgttgttgttgttctgctctactaaaagcagagagtctttgtaataaaatttgtgtgtttgagatttcgaaataataaaggtttatttatcggaagcttctagaacaatgaactgattgaacattgcttctttgttgatttcttgatccttaagctcctagaacactagtgaactaatacacaagtaacacaagtgaccgtgacatttttttaatgtgacagtaatatcttttgacatttagccttttgaaatgaaattacttaatgctagtaaaatataggcaaagtaaaaggatggatcaatcaatcaaaagatgaacagtcttttgagtccaaatcacatatcgtaatatatctaatagaaagttaaaagtgtta

SEQ ID NO: 29521 - DNA, 611 bp, Arabidopsis thaliana columbia
tgttgttctttatgactccagggattggtatattcttgaaaattccaagacggtgaaggcgtttcgttgtggagagtatgatacttgcattgagaaggcaaaggcgagctctagtaagaagaggtctggcaagtgtactctccgagaagatgccattaacaatgctctcaagattgagaatgaacatcttgcaaaagaagatgataatttgtgtaatttatctggtgaggaagattctaagaggtgtctctctggcaaagaggatgaagattcgggctcctctgatgcagaagagactgaagatgatgagttggcttcagcgccagagcaattgcaatccagtatatcttcccaagaaatgaataacgttggagcttctaaagtgcagtcaaagagaagaagaacaccaaatgactcggaagatgatgggactgaaggggtcaagcgaatgagagggcttgaggatattgggaaagaacaggctggtggtatagtcgagcataagcaagatttggatttgatctgtgctgtaggcctcagtgattcagtgtcgaatggaaatactattgccaatgggaacaaggtatgctccccgtcatcgttaaaaagaa

SEQ ID NO: 29522 - DNA, 455 bp, Arabidopsis thaliana columbia
atgtcacatgctataaatattttaattatatatctattttaaaataatcaaattagagtatttacaattttttaattttttaatctattaaatatttatgatattctttaaaaatattaaatgtattagtcctaaacaaaattttcttaagtttaagaccactgtagggttgccatacagaaaataacatttatcactttgtttagttggtatatgaccaatcttaggtttgatgcatgataaactggtaatggttttctacatttctttttttaacatctaaacaaactttattaatgtgaatcaaagtatacatgattatcaatgagattacgaatacaaccaattgtttttgtaacgagtatatgatgacgcaatgcatgccgcattcttagtcaagtactttatcatcatcgtcatttccgtcaatttggtgtgactttcttgcttaggga

SEQ ID NO: 29523 - DNA, 484 bp, Arabidopsis thaliana columbia
tgagggatgcaacacgaggacttctcgggaggtcacctatcctagtactactctcgcccaagcacacttaactgcgaagttctgattggatctgatgtattagtactgatatgatcgcatctgtttgtacatgcaatgcaatcgtatttctacttttttagcgtctctagaaaccatgtgccgtggatcccaccctaatgtttggtcatttgatgtcttacaagccaaatgaagttatgaagtatcggctattgctttgggtttttgatgtttggaattgtcacatgtagaaattattaggctcattagtttttgaactctttaatgtttggttatttggtgttttgttggatacagaatttggttctgtcttaaacttctactttctcgtttagactagttcaaagacttttagatgtttattgcttagtccttaattcatttcattggttatacaacttctacttctttatatgagttcggg

SEQ ID NO: 29524 - DNA, 578 bp, Arabidopsis thaliana columbia
  unsure (1)..(578): unsure at all n locations
taaatactaaacaatgcttaaaaatgtggttagacatagcgctatactaaagctaaaaagctaaagataaccataaaatcatgaagataataaatggacggatagaccaaaaagaaataatgaagcataatacaaaaaaaaaactatatcggttccaactaccacacatttaattcctttcccttttcatttaacacctgtgaagactcgttgcgagggttctctacctctttatgtcattcaaacttatcaattatcaagtctcttgattttacatgttcaaccaaacacgatttttcaaacttaattttatatatcttcttcattaattatcgaatatcacttctcttgcttatagttacaaaaactaatacaatgataattatataattctatgtgtgaacaaaacgataaatttgtcaaagtatcactatcaatcccttggaattagtagacaaccaaatatggatcctttaattgatttgtgatgtttctattcatttcgaactaaatgaaaacatctcatcgtaaataatccactgttaaattcattcacaancatacatttgattctgtgt

SEQ ID NO: 29525 - DNA, 617 bp, Arabidopsis thaliana columbia
cttaaacactagtatataaaaagattttacaagtgacctgcgcttgtagttacctagttcagctaaaagtaaaaaaatgacacaaatgtaatggacaagtactgaaagataattttattggatataaatgatgtaaccactgacactgttgagcaaaccttcacggctcattaaagatttataaaggacagtaagaaaaaaaatatgtttccccactaggctttctatttttagtatcactctaaactctagcgagtgaagatggctaaagtatagctagttaatgcttaatgcgtaatataaatatagttggtatatgattaaatactagtaagtctggttttcaagtaatgcagtttaaatggttcactgatgaattaaaattgacacacaataaattgtttaaacataatataaatgaggaaattaatgttttgaaggaacttcaatacagtataagaatatatgtgttctcaaaatggtgatttatgtatagttttctagggtctctccttaactccgttgctagacataattggtgttcgtgtataaatgatttgaactaacaaattgttaggttgaataaattttgcagcaaatttgaaggtggatgaatt

SEQ ID NO: 29526 - DNA, 474 bp, Arabidopsis thaliana columbia
tcatattgtcgatgaatcatataacgacatcaccaacaattagtgacattcacaacaagaacaaaaaaggtttaatcttgagtctgcatttcatgaaccaaagcaaagtccatgacatatcacaaacccaaaaactcaaagctcatttcgaaacttatactaaatcaatgttgcaaaaaatctaatttttaaagaaccaaactttatcgaatataataatattaagagatgaaaatgtacctttggagagcttggaagctaaagctgtcgccatttctgcaattcaaaagtttcgatctttagtgtcgcagagagtgaatgaatcttgcgattgcacaaagacaccagatttagggtttaacgtacacactcgctgtcgcagcgatcatttgggcttgtaatgatttactcatggattaaattatatagtagaaaagtggtgacgttgtcaaaagtaggcgtgcaggagtggtt

SEQ ID NO: 29527 - DNA, 501 bp, Arabidopsis thaliana columbia
gttgaccattgttatcaagattttttataatatacttttggcctactcagagagaaaagctcaggcactgaggcacttagcttagagttggcagtggtttgaggtgcgaaccgctatctccggccaaagacctcaatcattatatatttatatgtaatcacaagactgccgtgagtttggcaataatcagaagcgacgaaaccagagagtaagaaaaagtattgagtatttatcattaaaagttccaagtaaattactccatcactcaaaacttatagttcgaagccgggactgaatttggtcagtaataacttactatatttggtcaataataacttggaagttttgttttttcacagctaggctgactaaacttcatgagtatgccctatattatacgtaattggctactgataaactgattctaaaatcttaacagtccaagaacctgcctcagaagcgctatgaatatacgagtggtttgttggaagagactgcttt

SEQ ID NO: 29528 - DNA, 498 bp, Arabidopsis thaliana columbia
attttcgtttggagttgtgagttaattttatcagccagctcatatgaagctaattttagaataagaactatctatactagtttttttttttttaatatagaactatatatgtacacagttggacaatttctatataatttttcaaacataaaaaaagtatttaaatattttaactaatggaacaagttacaagtcaccccaaagattacagtcaaacttaccttttcgaaattgaatatttcttttataagaaccgttttttttgttttttaataatcattttgacaaacaataaatatacaattagagatttaggtgatatttaaacgagcgcctaaagttaaaaacttttaaacccagaaatcaccatcctgaaaaaacgtacatttccttttactttggttcttaaatttttctgtggttccggtcaccgcagctctgtcatcatctactacttcttcatttaccactctgaaatctactcagattctttgtgat

SEQ ID NO: 29529 - DNA, 529 bp, Arabidopsis thaliana columbia
cggatccataggccaaatcaaagaccggatcaatatcttaaagtcaaattcaaatcaaaacataacatacaggactgaacctgtctgactcatcacaacaacctcaatgtaagaccaaattttcattgaaaatgctcgttgcttctttgttttgagctcgaaacgttgttgcttatgatctgtttcactcttctctattctctcttcttcaacagaattagactccccaaaaatgtaaccgaaaagtccaaaaccaatgctaaacgcaacccacaaaaaagcgttagattctctgctttaatacaaccgagtattccaatttattggaccataatttccttatgtcaagcaccatcctttaataacgtttttggcgaataaggtttatcagagttttttggaatctgattccgagtaactcccatctaaacctcaacggttgaatcatctttgacatatatatcatcaaatcaagttagaatagcatttcaaagaaaaacaccgaaaatcctaaactttattataatgt

SEQ ID NO: 29530 - DNA, 473 bp, Arabidopsis thaliana columbia
tactctaaagaagtgtatgtttattatactaacctactcatccttattattgtaaatcttatgtatcagtttgtggactcttcaaattttatttagcgtcagagagtcgttagaacaataccatattgtattctcagggctcttatgtatctgtaaagtttgtaggagattttttgcttcctagttgttgtacccatgtatacgaaaaaaacccttaaccaaagatgatatcttgcattcatatttccgagaaaaaatcaacattgattactgattagtatataagttattatctttaaatcatgaacatctatatatgtgtggaagtcccttggtttaaaagtttctacaacatgtctggctttgattcttagagagtgcacttttttttgtagattagtggttccatactagtctggaattctatagcgatgtatacagggccgtccgtcatgatctcgagtgttaggggt

SEQ ID NO: 29531 - DNA, 868 bp, Arabidopsis thaliana columbia
tagagaaaggatccctgaaaaatgtatttataaatttaaacaaataataatgcaacaataaatgataaacaaagaaaataataaaacaacaattaatgattgagaaagacactaaaacccccactaatcatatacatataggtaaaagaaacaaaatcaagaagagtgtttatggttaaacaaagcaaaaatgatcaaataaaaacaagattatgatgttgttgttgtaaaacggcatagtcaagtcacaagcgcaccaccagacggtgccgcaacaacaacaacaacaacacctacaccgcataagttacattacaacacaccctgtctttaaaaactctttcctttttaataataaatctttctttaaataccatctctcttcttcctcctctgcttctcttcatcttctaagaaagaaacaaagaaagacttcacattttaccattatttgctctgagctcaggtcagcttttctctcttcccctctctcctctctcttctactttatggtacagttgaattaacaatgccattgaactactacttccatgaatgtatcttctttacacttgttgtcttaagtttctatttttgtctgatccagatctagtttcttctcttgtgtcttgtgaacactttagcttcttactgtctttatgtttgttgttgttgtgtcggtttgtttttcatttttccagtaatgttgaagaaacaagttcaagatctgacttaactaacttacactagttttagtttgctagtagctacataactcattgatcctggtaaagaactcagagatcattcgtctcttgaaaacagatccggatctgagatagggttcttgataaagattcgatatttg

SEQ ID NO: 29532 - DNA, 256 bp, Arabidopsis thaliana columbia
cgccagtgtgctctaaagatgtgtgagggattgcaaatagcaagatctcgattcagaatcatatctcataatgctagtcgaggtcctgtaaaaagggtcttaataactcgcttagagatatacgagactgcactgattgacagttagatgtccttaaagcgtcgattctgtgtctcccttaagatttgcagtagaacacccccggtgacgtgatggaactgatcaaacctatccctgaccatgtatagggcagttg

SEQ ID NO: 29533 - DNA, 1099 bp, Arabidopsis thaliana columbia
ctctgtcgatctatcgatctctctgaggattgttcgtcgtcggagagaatgaattcgacgatagatctgaagtcgtcgtcgggagggaatgaattcggcgtcagagatatctgaattcgtcggcgaagaagaggtttgtcggagagatttgaattcgtcggcgaagaaaacgtttgtcggagagatctgaatttgtcggcgaagaagaggtttgtcggagagaactgaattcgtcggcgaaaaggaagaggtttgtcaataggagaaatgaaagtgaaaacctaattattcattaagggtaagacagtcattttccacattaggaggggcagttttaaaaatggacatcaggaaagggtattgttgcaaaaggttatcagaaaaagggcacttttgcaaatctcccttttttttggcgaaaaaaaaaattgacggaaaatttcagtttccaattacatgttctcatttgatgagggtaatttggtcattttgttcaaaaaaaggtattttttagaatggacaatataaaaaggtattgttgcaaaatggtagaaaaaaatatatttttgcaaatattccaaagtttaaacaatttaatcttgaagttattaatattttaaaagaatttttttttttaaagggtattcaatattataaataattgcccaatggctatttccggatttaggcccatacaaatttccttagggccaaatccacaaacaccaaaccggacaagactatctaaacaaaaccggcccaattcaacaaactagaataaactggaaaagaaaccctaatcttcaaaagaaaacctaatcgaagccgccgccctagaattgcgcatactcatcggaaaagaggatcttcgacgagccaggacgtcgtaagccgaacgatgatggtgacacaagatccgtcatcatcccgccaaagaagagccggagaaagaagataaccgatcttgatatttgttgaggaagcaccatgagccgtcgtgagagagtaaaagcggtagggaatagattaggaatccatcgacggtggcatagcttcactggaccacagactgactccccaggaaccaatagtcccgtga

SEQ ID NO: 29534 - DNA, 578 bp, Arabidopsis thaliana columbia
tagacaataattcataaacataccataaataaaatcaacattaataaaataaataagtatttttacgtgacgggttggcgggacggatttggcaggacgttacttaataacaattgtaaattataaaataaaaatattttatagatagatacaagttgcaaatttttctatatattaactttaaaaaaatatattatccccgcggtataccgcggtctaaaatctagtgagttacaatatgggttaaatggaaataaatattcttattttttaatataataaatgacatgtcaagcaattgttattattagaactccaaccagataagctaatgaaataaaattccaattgttttgttttattatttagcataagtatagttttatttatttttaacttcatattatggaaaaagtagggaaaatatatctctaagttaaatattaagctttttgtaaattgaaaccataatttttttatataattaatttaagattatgtaacaattgttattagttaaactccaaacaaatcagccaataaaattaaaaattctcaaattttattagataacgggt

SEQ ID NO: 29535 - DNA, 699 bp, Arabidopsis thaliana columbia
tggataaacaacaaacaaacgaaactcgaagacaaaatattgtaatgggggaacataatccaaaatctttttgaacttcaacaatgaaactgtagaattatttgttaaaacacaaataattattgtctcagctaataaagtatcatttattaaatacgtacacaaaagcagtaaatgcgttgttttgcaaatattttctccactggaattctctctcttcctctgacacatgtctccgtcaagggcatattggtccacgaaacttgtatgtctccatgaatgtgttacaaacggatagttttttttggtgaatgtggtacaaacgaccaaatttcccttttcttaggcatatttgtttttgaacatctgattttatatattggattcttaggcattttcttacaaaactcatagttttctctataatcattagtttattttctagtacatttgtcctcaagaataatccttctcactaaataaataaatatttgagtgtgtgaatccgacatccaaattttggcgccgtctgtggggacggaggattcttgagtcgtcagattttttctatctattacatttccgaagtgagcagcaatgtctggagaagatgctaccaacgcttcattagccgaaactctcaaaaccatgcagcaaactatggcggaaatggtgcagaagttttcgaatgtggaaaaa

SEQ ID NO: 29536 - DNA, 232 bp, Arabidopsis thaliana columbia
tgaattgcaactatactagtgccgtgaatcttttgcagtcatcgttcttgggtagacttacaaagagttccatatcataaggatctcgcaagcgcggttcaaatgttgtacgtggctatatattcgaacgcgatgacagtaacagcaaaagctcaaattcagtggcagaggaaccttcagttccagagacggtaaagctcttccctatgtaaacatacacatttctggtaca

SEQ ID NO: 29537 - DNA, 584 bp, Arabidopsis thaliana columbia
tagtaacgtaacgtgtgtgctctaaagcgatgttctggacggattataccgctagtgacgcttataattttaagtatatcattaagagactgcgaaaggtcgtagaaaaagaacgtcgctactcctgcaacagccgaagggcttaataatgtcattctagcttcatgttcgattctatcagcttctccgtctcgcaatcatacactctgctaatgttatcgaacatgaaagttacggtttcttagtatgcctgttcgctcttatggtctgcccgtagccactcgaagtgcataaaggaaggtagagcctttcaaaagtaagagactatagatagaatattggttcaaacggtaggtcgacatagcatcatgcagatcatggatctagccattaagaatgatatgcacgggcttgtaatgaatatcgaccttaataaatgggaatagtcatcgaatagtagcaaacccagaaattcatattgtcaatcgtatgcctaggtagagctaatatcatatatttttggaggtatttttgggcgtatggccttggtttctcattccttctcctgcctagttgtagcacca

SEQ ID NO: 29538 - DNA, 582 bp, Arabidopsis thaliana columbia
atgtataatgttagtatataaaattaaactataaaatataaatgtattagagaatgatacaatttgcaaaacttttatatataaaataattcttaaattttaaaaattactctttaaaaaaaaataacgggacgggtaaagaaattatagaacaggttttattttggaattggattatatggtggatcctattggaatcaatatttataaaattttaaaatattattaatatgctgttttaataggggttaaacttcagttttttaaaaattgtctcatggattcgtggtataacgttatttaataataattataaactgtaaaatataaatatgttatacaaaataaaatttgcaaattttaatatatattacttttaaaaaataaatcgtcctgcgatataccgcggattaaaatctagtataagatatttaagatgattaatcaagagcagattagcagaatgatctggattttgatttataaagatattttcatatttaataatcgaatttatatgttttcatacaaaatttcgagtttgcttatataaactggatccataaaacaatctgtgttttt

SEQ ID NO: 29539 - DNA, 141 bp, Arabidopsis thaliana columbia
gaaaggtttctgttctgcgccggagctcatcgtttggtcccgcgtcttctcttccaatacccatgaggtcaaggaagtataagtagtgtgagattatgttgttcattggatcaatggaaccttgaccacatgtgtactctc

SEQ ID NO: 29540 - DNA, 568 bp, Arabidopsis thaliana columbia
catgatgtttcatatattaaaccaagaggatcatcaattggagttatactacctgtagttcataaagtagctgttagatttcatctgacgtattagaaaatactaagatgactgtttaatagagttgatattttccaggaaaaagattgaagacatccccgaagagaggcgccaccatttgctgcaattattagagccaaggtcattctttctgaattcttatatcgatatttagctttgctgtcatgtggttttcttacgtctctgggaaaagattggattcatatgccaaagaagttgacatggaaaaagaacttagagcatgtacagttttcttcatgagagtgtatgtatgcaggcttatatctagagcatgggaaatagcaagcactcggtatgaagatccaaagttagctaaaatgactgcatccaagatattctctgctggaaatgcggaaattccagttgaatacttcagctgccgaacaagtcagggtaaccattttaggtctgagccctacaaatataaatgaatgtgtatgttataacgtctggttttgcattttga

SEQ ID NO: 29541 - DNA, 365 bp, Arabidopsis thaliana columbia
tttattctttcttctctagatttctcaaagaagctatatgaatattattaatccaatataatctatatccttatcttttatgatcaggactctcggtgctcttatgaagtgattgttaagattagcgtacactaagcctttgcttcagaaagttgagtgatatgtttgactcactttcaagatgacaaatgagctctagcaaagatggatggcgtaaactccgttgagggctatagaaatccttttagttgtccgtttagtgagagttatccgagtctttctctttggagacatttggtctagacacaacatttgtggcgaacaaggttttagtgggaattcttaccgtctagaaatatggaatt

SEQ ID NO: 29542 - DNA, 590 bp, Arabidopsis thaliana columbia
  unsure (1)..(590): unsure at all n locations
tagtaacgaccgccagtgtgctctttactagaaactagaaggaaatgttactgaaatttcactgattgtctaaaattgaataatctaaagaaaatggccttttaacctttttcttaggcccaaatgggctcattaccactcatgcttgttcggtgacccgattcttccggtaaaacagagcctaaaccgtattttcaggttaggctggtgttttcttaattctccaacctaaaaatagatggacacgtgtctatagaggctgagatattggtctcaatgaagaaaactaacggctcagacccgtgtatgaacgatattaagggccaaagttgcttctgttttccagaaatttttgaaacccaatttcagggcacgattccacaacctctttcttttcttctagatctacgtaaattcatcaggtacatgttattttttttgtttatttgatgtcaaattttgatcacaaggaggcaaaaccaatataaatgtaacgctaatgcgtttgattatggtatacgtaacgaattagatttactggttacattttattgttttagatttagttatgagattggcantaattattg

SEQ ID NO: 29543 - DNA, 403 bp, Arabidopsis thaliana columbia
taaaaattttatgtcataaaaaaaatccgttgaaaaagactcggatccatttgacccgacttttaaaaataacgggtcataacttctaatcttagccatccattacaattaatagtagttgttgattgttttcaaaataaataaaatcctacagcaagatttttgggagaaaatctttatttatttccttattcaatataacacagaattatgtgagtttcaatttggaaaacaaattatactcttatatcatagaggtttacaatatttattatatttgaaaagattactaatgcaatcatatttttttttcaaacatttcctaatcaaatctgacaaatctgttatataaatattaaatttacgaaaataatttctgatttgaaattaattatatataata

SEQ ID NO: 29544 - DNA, 434 bp, Arabidopsis thaliana columbia
aatacaaattaattatgaataaaaattaaaatattatcaccatgggtcaaatcttagattataaaatattgagttattaatgtcgtaaagttacgactcactaaaaaccgtacataatcttatcgagattattaatcaacacaaacaacaacaaacattatatacaaaaaaatactctattttataaaataaaatatttaatatatggtgtacggcgggtcatatcctagtttcatagtataggaaagggaagagaatttgggtaaaaaaatgtctcatatgtcccaattaaattcgaaacattaatagaaatgcgagcaaatgaaaccatgccaattaaaaaaaaaattataataacttacaagtaacttgggtaccagtttgtgtgtttatttccaatattttattcacttactcccaaatgaacctagtgg

SEQ ID NO: 29545 - DNA, 406 bp, Arabidopsis thaliana columbia
ttgtgttttgtttcacatgcttattctgtttttggtcgtttcaatgttttatttcctaatccactgacgaaatatattaaatgttattgtgacacacagttatgagaaaaattataagcctctggtagataacatgattcagaaagatttagccctaaagtgacacctcgacggcgatgagcttgagatatgagcgtccaaccagcttcctcaagattgccagcgtaagagtgttaactagattcttacgattaaactttctatgtgaagtttttggaatctcactgtctttacaatgcttgcttaccaaattaatatctatttctcccattgtggaggaagtacggctcgatagtcatgcgtcgacacactcgcagaagtatcagaaaggtttcgctgatgtgtc

SEQ ID NO: 29546 - DNA, 620 bp, Arabidopsis thaliana columbia
aaacacaaaaaatctgaatgacataaaaaaataatccaccaaaacagttatgagtaagttaaatgatataacaccattctttctgtcatttctattttatttgagttaccatgcaaagccttacattgagaaagagatatagaatgatcaagtacatttctcattgtcatttgattgaaaatataaaattcaaaaaaccttacatcaaaacaatagaaagtggaatgtatagctatctatgtggaaagtggaatgaaactttgaagattaaagaatgtaaaagaatcatagaaagaaataaaaaatagtttatcaaatgggatctcgatagatataatctaaacttcttctcccaactttttctctcgttgtttcccatgataaaaagctttaagacatttgcaccaaaaagatctcaaattcacgttcacatagaaaaattaacaagaggcagaaggaaaaaaaatgtggaggtcattcgcaaggtaaacacactcgcaagacatacgtctaatctcttctttattatctaattatagaattagtctccatctcaatttcttctccgtggcttttctctgcagaagcttcaaactcattaatgtaccaaatggtttgat

SEQ ID NO: 29547 - DNA, 509 bp, Arabidopsis thaliana columbia
ttttttttggtatacgttctatatagataacttcagccttgatcaggactttgtatttccacactttcatatatcgtagacagttacccacaaaatcaaaaccatctgttacttaatcactctgtttacttcatatctaaaccaatatttcataatgttgctcatatagtagaggcagattaggttcattagttagtgtaaagtgtagattaatcagcttacttacacaagagttatatatctaaaagcaaacaggaagaagttgagaccatgtttctgcaaaaaccccaaaagactaaagatgcatttcaacaagtctcataagaacttttgtatcgaaaagctaaaagagtggccaactctacacaaggctaattcttttaagagtattcacatttttgcacaaaggtaaagaaagacgagttactccataagttgtcagatatagagcttctgcaccacttttgcttcatatcaataaggtgtaagaaaagatcctcacctgcaag

SEQ ID NO: 29548 - DNA, 203 bp, Arabidopsis thaliana columbia
gcttctgtcttaagcctctcttcttcttattcttcttcataatttcacaaatcgttaatataaaaacaaacaaccaaaacacaaaacaaatcacgcatcgttatcgcgtgtgactccaaatgctccagtcccaatcggtcattatcctataaaatagattatattcgagttgtatgttaataaacaatcacaacattaaaaaa

SEQ ID NO: 29549 - DNA, 515 bp, Arabidopsis thaliana columbia
agtaaaaaatcaattaaataaactcattatattataataaaaaaacaaagacaattactttctcacattcttttcaccaaaattctttacatagtttagaaaattatatgatatatagttttaaaatccgaatttggtgaaatatatctagttttatttagtattcaattttaaattcataatgcttacagccttatcctatttattaaaaaaaaatccaacctttccactaatgcactcccataacaatttaacatcgttggttcatgtattatttgttttgaaaacaaaaggcttttaaaagcctataaatatccacccaattgttatcctccccaaaccaaacggtcaaacctcactcaccatgagacaccttagctcacctccatggcctctcctccttctcctcctcctctcttctttcacctccggcgaatcctctctgtccgcagaaaaaaacaaattgcacaccggtggtctcagtagacagagttttctaaaggattcgtgtttgg

SEQ ID NO: 29550 - DNA, 585 bp, Arabidopsis thaliana columbia
ttttgaggcacaaggctcaaaatctgaaatttacaggatcatgaagtccattatcaggggaagatcagagagattcagtaacagatataatccctcatcaatgactcggattgacaaaaataacatcgtttaaaggatcgaattgcttaccaaattatttctcggacctttgtattcttcaatttgtccgagctcgtaccatgtaagagatcggcttattaaatgttgagtctgtagtcgccggaatcaccgtgaatcggaggagaatgattcaacctgtcacgcaccgggtagcagggcccgtcgcaagaaagatgagataaagacgaagctgaaataaaacgacgcggttttaacttgttatcttggaaaagttatgggttaaattagttatttaagaaagtatgcgttaagaagcagaaagaacatataaatgaagggatcaataaagaatatttaaattttcgacccattataatggatctatccatctcatgcctgtttcttccgtctctctcttccttgccagaatcctgagtttcctctgactgtgcttagtccatcatactatatcgtctgattcag

SEQ ID NO: 29551 - DNA, 811 bp, Arabidopsis thaliana columbia
ccagacttacgtcacactgtccccggtgtgaaataagcatagggatgattcgtgagaacgataggttaagagcaatgtcaccttgttgtggtgactaaccggatgatctctcgccttgcttaacatcgaacttactcggcttagtatagtcgaattccatgatattaatctccattcacatattccttgaaacaaaaacctaaaaccaccaatagctttaacaaaacaaaataaataaaacatacctaagatagagtttatcttgtttttgtcattatggcaacgaataagatcaaatttatggtaacggattgtgtgaatggatggcgatgcagttgcggtgcttggccgaaagggtggagtgggtggatatataagcggtcaggtgttggatggtgtcgattgtctttgagatgggcggaatggttcgcaggtcaaacgaatccaatggctggcctatcggcatggcggtgcaacttcccctatccattcatgggctagacatagttggccgagttttgggtcgcccggatcggcgggcagtttcttgcccaggccgacaatcttgttccgggcggctaggtgaggcacctctggccaaagggtggcacagtcgggcggactccgaccaaagattgacacggtcgggtcggctttttcaggtgacactggttactcggatgagtagccaggccggttgtcacgatgccaagtgacaggtctatgtgaccttcttccttctcttttttttggcttcttctgtttctatttttctcttttttttggtgtgttttatataaactgaaacaaa

SEQ ID NO: 29552 - DNA, 571 bp, Arabidopsis thaliana columbia
ttctcaactttgtaagcttttctctgattctctctatctctgttcttgttgaggcagagcatataaattgtatataaaatcatatagggatcattacggttctttattctcttttaatatattgcatgcaatgatgatttctaaaaatatgaaaaaggttttgtgatgattctgattataatcattacagattgagaataacatagaaaatcaatcgttgactatatcagattcaagaattatgttgcattatgattgttactcttaaagattgatacttgagtaacaaaactcgaattttcctctgtaaaattgcttcaagttagctctaaaattcacaatttgtgtaatgttcataatcgaatttgataaattggtttttaggcgttgaccatattagatcatctatatgtcatattgaattatcattgttgttgttaaagattgatacttggagaacaacaacattcaaatctcgtagactatgctctgtagattttagaatcagactgattgatcataaatattgatacttttggagtgtacagggacttgcaaggcctgaaaaatg

SEQ ID NO: 29553 - DNA, 1012 bp, Arabidopsis thaliana columbia
tcaaaagtttttgataaagtaaaatactataactaaattttaaataagaataaatacaagttttaagcaaaaaaatattagaattatatttcaaaacaatttcttacatataatgtatatataattgatatatttataaaattattaatttatgatattgatgagaccatatatttacataggacttttcaaaaagttattatcttattaatttatcgatttatattattttttataatggtcccaattcgggagtgaaagaatttattaatttatagagatttaactgtaatatgtatcatggtggttggagataaaattataaacagcatatctctaataaaaaactatatttagtctgttcgtttagtggccgcacgggcagcgcgctgcggttgcggcacgggcaacggtaacactgccgcaggttgttgttcgtttcgtcgccgccaacgttgccgcagccgctgtcgcaaccgcagggttttgtgttcgtttcgatgccgccatcgttgccaccgacgctgccgcatgtttggtgatcttgacagaagaaacgaagaagagaattgggatttagggtttgtttgttgaagaagagaatcgcttggtttgtttgtgaattttcaaaaataataaggatatttttgtcatttaggatatataacgcaactctttcatctttgacgctaaatttaaatggcgtctaaaatttttaaccgcagaaaactgcgtttgacgctgcgttttgccgcaagtagttgcgcaaccaaacaaacacaactagttgcgtctaccgcagccgcaggtacccgcggcgacgaaacgaacagactaattataaaatcccaatcaaactttaaaaaaatcagttgaataaaaatgtacacatattgaaatcataatcatcatacataatattatctgattgcgtattcacatttggtgtccacatgggatgaatattgtccccaccactattatttatattccatatgcattatcacatttt

SEQ ID NO: 29554 - DNA, 796 bp, Arabidopsis thaliana columbia
ttggatgcaggtaagtgttgtgcctctgctctctgttcttcgcattgaaatttttaactgagttgtgcactcaagcatggggagatgatgcgagaactgcggatgtggatggggactttgatctatgaactaagggggcgcatgatttgtgggggaggtttagtttgtgggggagtattgttttaagttgttttgagtgtttctagtcgttttgggtctagggttattcagaccagaacaatgctttgctcgagtgattgtatcatcacgggtgtgtaataagatgtttaatacatggttttttaaacttattactttatgttgattggtttatagttctagattctatctattggctgtgtggtgtgtcttccatttgagtttcaggttatatcaatggaggaatgcttgagtatcaaactcagtcaaaaaggtggagattgaagatgcatagttcaatcaatcagctgatggcgatcagaaccgtgatggatttcaggaagctgcatcaaattccatcaaacgcctgagttgctgacatggatgcaagagcagacgtggcaagctgtagcggatgatgtggagagccaagaatggaagttagcttggcgtggtgtcaaagacaagattcaccgagaagatatagaagatattgtctcgaagaatacgaaaatgaataggcttggaaacaaggaagattccatatcgtgagattctcggagatcctaagtttagggttctggagaataggtataaggattcttgaacaaagggggagccgctttgagcaccctag

SEQ ID NO: 29555 - DNA, 735 bp, Arabidopsis thaliana columbia
ttctttcattggaaacaacaacacattatattgaatatacatctgaaccattttgtacagtttcagcagatccttcagaactcatattaaggatatctagcgcagtagctgaatctgatatcttccggcgagtcctaggaccatgattatgtgaccatccattgctggttgcttggttcagcttttttttagcaccagatgttgactgtttctctgaagctggtagaggagccccaaacccatcaatcgaaggaatcattcctttgactgacttatccatgcatacagacatttgggaattcagaccgctgattgtccttactggcctaacagggatatccaagtgttttctaattgcacttactacgccagcatagaaactactgcatgactttagctgctccagcacaaggttcacatcagtcacatgatagtagttcaatgagcctgtgccatctgtatctatcctgcaaattcatagtggacgacatcaaccaacctactaaaatgtataacagttcctacaatcaacatatgaaagaagttcgtagaaataaatgataagaatattccacatctgtatacatggagggatagtaagggttaccatgtgcatctaaataacgagcaaaaaaggcttttcacagatttaaacatgcaattcaacttattggaaaatttgacgggaaggacgcatagtttcacagttttatcatgttatctgtacattttagt

SEQ ID NO: 29556 - DNA, 645 bp, Arabidopsis thaliana
tacgaaataaccttgttaagttaggaaaactacaggatccaaccacaaatccaaggatagctccaggatccgacccattgtcactaggttttcccccaaatcaaaacttttaacctaactaatatttttcgaaaatcaatattgtcgctttctcttctccgattaacttaaacggcgattattccggcgattcttggaaaattttgtcgttttctcttctccgattagttcaccgtcaccggtttcatctctacttcttcaccaaatgattttgctaagtcgttaccgctgctgttccaaaccgccgacgtttgtcactgccgtcgttccaaagcgccgatgttcgtcaccgccgtcgttccaaaccgccgtcgtttagccgccgttaccgctatactcttgtaagtatcttattagtttataaagtgaacggttttttatttgaaatattagatgtggtttttgttgtgttgatttgaacggtttctttgattgttgtgtggtttgcaagggaattatggttcgtgcaaagttagtcagtcctacttcgagtgagagtgaagatgagagggtcacgatccgtgaagtggatgtgaccgagaagaagtggtagaggacacaaagtggaagacgagaactgtgacg

SEQ ID NO: 29557 - DNA, 987 bp, Arabidopsis thaliana columbia
tgactagatgctttgtgtatcattgagcatacgaattagaagagcaaccggattccagaagctaaactatctaggatttaagttttaaagtttggggtctatggtttagggtttagggtaaagagttttgagtttagggtttaggttttagtgtttagggtttagggtttagggtttaagatttaggtttttggatttgtgaaagtcaaaactcgcacaatagaaattgtattaagggttccttcaaagaacggatctttgtgagattctcaaagaacaacagaattgctgattaccggggacgatgttcttggttatattattgaaataatgaggatttgatcgtacaagtgtttagaaatatggaaaataagtgttttgccttcaaaatcagagcggttttgtttgtcccctttgagagcgtttttgtgcgtgtccctttgtttgtcctcagaggtgctttatatagggctttggcagatcgcttctcgcgatattctcggaagatttctctttatcttagagttggcgaaggagattgtctttatcttccgaagattttgggaacttctatattcagtgacatcctcggagattctctaatatctcttccgggtttttcggaaatggtatgtttgatcttgtattggttaagtcttttcttgaaggttttctgacccgatccgaagttcttccgagccgggttgagctgaccctcgggtagtggctgagctgctcggaccgcgctagtcgaatgatgcactcccgaggcgtcttgaaacccgccacaggatgattttccaggttgccatccgaggcacttcgagaccgggtcgaggaaccattttgagttgatgctccgaggcgttctcgatgtcacctcgggatggttcctcgatgtgatctttgaggtgaagatgatgctgtgtcttcttcgagtgcccacgagcagatgatctcatgattacgaattcgagtaacgcatca

SEQ ID NO: 29558 - DNA, 1058 bp, Arabidopsis thaliana columbia
caaaggggcttcgtcggcaaggtctgaaacttgacggaagaagagaaagcaacattgacgacactatgaggagcaaacaaaatgatggatacgaaggagaaagatctcaggggtgaatctccgatgagcacataatacgagacgagcaagatcattagatatgggtgacaaaaacaaaacaaaaatctagatctagcaacgccggcaagagctgaccccgtcggaacatgactcctcgaaggttgtgctagagagagaaatagctagggcgaacttttttaaaaaaaattgcgactttcaaatagcttttcaaacattttagattagatttctttcgaatgaatattgatttcttcatgattagttttaatgaaattttctgtttgggcttctacaaatttcttcttcgctattgtttgatttggatcacaaatatactttcaactattttagattagatgaatatatatttaatcacgattgaatactaatatcatgtgaaccaaaaacatcacgcttatcttcttccaccatgaaatagattgaatgcagaaggattaaaatcgataataaatttacatatatacatgaataaacaaacgagttttcttcctagaccatatagctacatttttaacgactaagaacagaatgcgatttaataaacaatgtagctaatgtgttacaacccgtagcaaattagctacatattgcgagacaaatttttctgtaacaaatttgttaccaaatgtgtttaaaattttgttgcaaagttccacaaaacaaaattcgtcgccgattttgtaaaaatagttgaatagaatatcaattaacgttttacgactattatcaactagtcaatttgtagctattagcgacgattgatgacaataaaggatatcaacaaagttgattagtatcaaaattgttgttgtaatttttcacaaaaataggtttcgccacaagcttttgtgacaaaataagattattactattgtttaaactttgtaacaattgtgtcagtcgcaactagaaacgaagtggagactcacaatttc

SEQ ID NO: 29559 - DNA, 611 bp, Arabidopsis thaliana columbia
cccatgtttacgtgttcacttaatataatgtattaggatgtcctgttggttgttttagattgccagtctaatgatttgatactgatgactgcaggctcatgaacagcttagggctgtatttctgactttgttagaagaattgccatcaaatctacccatattattacttgctacatcttatggtgaattgtctgacatggaagagcagtcagtatttgacaatcgatctgtgtaagttcatgttctacttgtaatcactttgtccagtaccatactacagctttattattagcttttcttttgttatcccataaaagctggtagggcactttctttgaaagtcggtcatccttgcaatataattatatactgtacaaacttgttctgaaagtcggtcattctttcaaagtcaaaaggcatgtatcagtagcctgcgagttagtatatgaagctgtagatgcttacgtatgttttcgaagttgatgtttttggttttctaaatttgtttggcaagtaatgatcagatttaattatgaacttatacaatatatttgccaattacatgaaagttcagagaaaaattccagtgaaatagcattgcgtatttattg

SEQ ID NO: 29560 - DNA, 521 bp, Arabidopsis thaliana columbia
ccgcgacaatatctaggaagagcaaagatgacatctcatgtatcgttgtaaagttccactaatcttctcttcttcttatcaaaagctattttgtctataagttaccatcaagttgcaagatagagaaatatatgctcaagctgtgtctgtaaaaacccagtaatgaggtttcccagaagatgtaatatattatcgaaatcgcaacagccttaagatacaaaagaaagaactgaaattaaaaacatgaaataaaacaaatcgcaacagccttaagatacaaaagacagatgttcttcgtagttgttgtcatcttcgaatctcctcttctctgcagaaatagaaaaacaaaggacaaagtatattgtcagctttaacatacaagcaaaaaaattgtggtggatcaaaggaattaatggaacttacaagcgcatgtgtggtctctagacatggggaagtcagaactgaaatgacactggtcggaaagagccaaaacgtctggcttgagtgattcgatggatgtg

SEQ ID NO: 29561 - DNA, 1057 bp, Arabidopsis thaliana columbia
ttatatcatataacaaacaagaaggaaacaatatcttcaacttataattaataaagcaatattgctaaagcattctgatacatgttgtgcaacatctctcgaagctagattacaacatgcatgtgcttctaaatagattacaacaaagcaactttttaacatgtttacacgaaccaaaatatgcatacacatatatagccttgattttataattcacatagcccttgttatcctttagaatacatcgtagacacattcttacgtattctactattatatggcaaagcaatctaggataatgagtgagttgtattttttgaatgtaccctctattgtacaatgaaaacgaatgtaaatattcagttttgtttttgttgcccacattttattgccgtaaattgcaaactatttttttaaaattgatatgctagggaaaaaatgagttaaagagcatgatggaggaaacagaaagaagaaggctttgaattttgatggttgtcgggacgtggagaggatctcacgtggcagtttcactctgattgggtcctaaaccgccggcccacgtggcatgccacttgtcactggtacttctctttctctctttcacagcagcaagttgtgtacgattgctgttcttattaggatccgtcacatcacttctcagccggtcagcccccaccttcctccattaacccatcaatccggtctttcgtttttgtgtgtatgttctgtggacttgattggtaatttggtaacatttaccatttgaatggttgcttactagcctaactttttgtttacaaatgtgcaaagaagttttttttttttcttcgcttgtagactgtactcttattctgaagactagattttgaagattctatggtgatttcagttttggaaatcttttggtgaatgaaggttgttagaattttaaaaattgcataattttagcctttaatttttcgtttcctagtgctctctgataccggatttgtataactggttagagcttttgtgcctctgatcctgtatttctaatatgtattactaatatgat

SEQ ID NO: 29562 - DNA, 458 bp, Arabidopsis thaliana columbia
tcatcatcatcacatttcactatcttttgcatcatctttctcggaagcttggcacggcactgccttagatcaatgagcggctacatagcacaagacttcccgaactgattctatgccttagcttccacgtctcatttagaatatctgagctgttaggtcgcttcagatactccgctacatctatctttagtgtttttgtgggcatcacaggcttcgtgaccgagtcatatgggctccagcttcctctgctacttatggtaccaatgctcgtctttcgcccactcgatgcatcctatcagcatacattcatgtcagagaaactttctacgagtcatctatctaaccggctatagttttagacccgtaaggagtacggtcagtgctaaaagtattgttacctgagttgtatccgactcccagacaagagattttgaatttggggttgtcgccgacttgat

SEQ ID NO: 29563 - DNA, 1049 bp, Arabidopsis thaliana columbia
ttgtgtatatggccgtctctgattttggacgaaataaaaagaactattttgagttaaaccctaagccaccgttagcgtgatcgagactatgcctcaccgttggttatccagccaccttctttaaagccacaaccaccgtgattatgagagagacgattgagccaccggtattgttgtcatcgtgctgttgtgtttgaatggatcgaggaacttgtcagaaaggagagatctttgtcgttcatcaccaccaccaccgccgtgtgttgccagaggtttccaacacgagtcacatgacgttagccactgtcaccggagcagtcgtagacattgtcgaggccgttaagggtaagaaagccctagatttaatctgtaacttgtgctggaagtttctggcttgctttatgatatgttgatatgttgttgtttaactatcgacccatgagggctaaccaccatggcttgaaccgccacatatcagattgcttagccgtccacttcaccgttccagccgccgtgtaaacagtcccgccgagatccagtgttgtcgagaaggtatcggctgaaccttatctcgtgtcgttgatatcagatggattattaaaccgatgttctatgaggtgattgattattatagggatggattgaaccagcctaaatcatgagattctacgtgtaattgattcctttaactgaaacttgacgtgtagtgattaactatgtgaatcgttgacgtgtagtgatgggttctctacagtaaaattcgggacttgtaggttacttgggagtggcaatggttatgccattctaaagtcctatagactaaatcaccattttgatagacaacctctaatgactaatttggagaaaattttggttttcggtatatataacagagctgactggtgagactttccaacgtcaccagttaagaaatgaaattgggacattcaccactcaccaaagttaaggtcatttgcgtatctgctgagactcttgagatatgttgttagtgtaacattgcttacagaaatttttaagttagtgattga

SEQ ID NO: 29564 - DNA, 486 bp, Arabidopsis thaliana columbia
atctttatcatcaatatctgaatcatagaactccggtttgatggagtaatcaacttcctcgtcatccgaaactgttacaaggtagtagacaagaagaagttaggcctcatcaaatcaatatacagaaaatagacatacttgtccttctgattccacattattacaaaataacttgaaatctaaacttgaacacaagaacacgaatctcttgaatactgaagaaacaacttctcttttcgcaatctatggcatcaattagcttacgaatagcaacatcaattacaccataaagattcagaaacttagctaaatactaaatagctcaaggtctcaatacgatggatgacaaaaaaagcaaaagagagatcatattaaccgaaacctatgagaaatgcatggatgacggaacgagacaacaaagggattgagtcgaatcggccagcgagtgaaagggtttgagcgtattaaaggttttattttacctgt

SEQ ID NO: 29565 - DNA, 525 bp, Arabidopsis thaliana columbia
gtgctctaaagtacgctggtaccgccaaatttggagacaacaatttcagacataactacctcgtgtcaggggatccattttcagccttggcacaagggaagagcggaagacgggtgggcgcagagcgatacttcgctactattttcacccagaagtgctccaccacttgcgaaacgcccgactgcgaacgcttctggtgacaacccaggggattcagcccctgtagccgatgatgaacgtggccagccgttcaatcacctcggcgatgcaccccctcaggtgttatcacaggactggctcctccaacaccgttacttgggcaaccgcctcttctggcctgcgctacgcacgctagtacatttataaataaagggtgagcggggcggttgtcaacgatggcgtcatgcggatttttcatccactcctggcggtcagtagttcagctaataaatgcttcactgcgctaagggtttacactcaacattacgctaacggcactaaaaccatcacatttttgtgtgactg

SEQ ID NO: 29566 - DNA, 325 bp, Arabidopsis thaliana columbia
tgactgttccatgccttgcactcccaattgtgataactttctgccaaaaagtagaactgtttgatgcacatgaggtagatgatataatcggttgtttcaaggaccttatttccgagttgctaatcgttagaaagtctggtgctttacgtaagaggttgttgatggcttcctgtattggggcgggagacctccttggttctgtattgaatgaaggtatccaccctgttaagattgagtctgtaaaagagttactagaactgttcaagaaatgttactctggactttacccaccggttgctcactttggaggcatgctcggagttgt

SEQ ID NO: 29567 - DNA, 545 bp, Arabidopsis thaliana columbia
gactctacccaatccccagcaataattgtgtagggattgaaacacaaagcacacttgcaaatgtcccacatcggttaccagaggaaggagctcaagaaaactcgcttataaataatgcatgttccattaactttaaaattaaggagctaaagtaaagtatacgtggtctaagaattgagactcaaactgttaaaattttatcagttatcaaaccgattttatcattaatcggccagttaccgattaatttctccgatttgagtgaaatcgcgtcggatgagtactgccgagtgattatccggccgcctgcgtttttgaataggggttccaaccatactaatttgtaaacgtttcggtgcatgtaggatttttttttttttgttttagttcttgaaatgtgatatttatttgaatcacaaaatcgagggtttatgtataaatgaacgaaaataccaaaccaccctatatgacgaaacagagcataagaaacagatgatgagagattaagctatcgggatagtagacattagaccagctttgaagga

SEQ ID NO: 29568 - DNA, 370 bp, Arabidopsis thaliana columbia
tgcgttctcatatttacctttacgatacctccaatcttaacttcgtttaactgatcatcttctttgaatctacaacctcctcatattttgtacacttctccctttagcggcttcagttgaactacttaactcatcactcttctttaccgactttctcctttaagttttggatctttcataccttgcacctttactcgctcgataatctttttgcattatctctatcttgatcatcccgcttacacccgtttactctctgatcatgtatccttcttcgaacattaccatttgatccttagacgcagttttcttcccacatccctccgataacgatattcctttgatcaaacttcaccttctcagtttttga

SEQ ID NO: 29569 - DNA, 525 bp, Arabidopsis thaliana columbia
gggtcaacatacatttctgcaaatcaaatatgctggtttaagtctactaaacacaaaagttctcatatattaatatattttcttttgtctcaataattctagtaaataaagtagaggaagagaatgatgcacgccagtagagatttttattcatataaaatcgttgtctttagaggaataatacatgccttaattctcaacaaaaatacatttataatgaggaaagtttactcaagttgcataatatatcaaagtacccaatgcacgaattctaatctttttttaatactaatcattaagtccattttgacgaaatatgtgaacgtcattacaaaaatcttcagaatattcagaccaattcaattttattaattacaaggattatcagcttcgaacataattagacggtaagagccgccctgttagggttttttgtcctcaatgccaaaagtcctcccattgcagatattatatcactcccactggtctaataaacaactctcttctcctctctacccagagcga

SEQ ID NO: 29570 - DNA, 198 bp, Arabidopsis thaliana columbia
atcttggagtgtggtagtttagtctcgaaaccagtcggtagaacgttgtcagatcgtggaattaagtagttttattttaatgacagtagtagttataagcatttgagattgggtttctatttctcatcactttgtattgacaagatcgtggcaactagtggactttacatagtagtagattttggctataaaaccgtg

SEQ ID NO: 29571 - DNA, 453 bp, Arabidopsis thaliana columbia
gccagtgtgctctatcattccttagatatgtgtattgttgtttcactcctcctctctttcaattattattttcaccacgttttgttatcgatctttgtctttatcaattctttgatgagtagattccgatcaatcttctttgaatctacaacctcctcccattttgtacacttctccctttaacggccccagttgaactacttaactcatcactcttctttctcccttaagtctcggatctttcatgccttgcacctatactcgctcgatagtcttcatgcaatatctctatcttgatcatcccacttacacccgtttactctgtcatcatgtatccttcttcgaacattaccatttgatccttagacgcagttttcttcccacatccctccgataacgatattgctttgatcaaacttcaccttctcggttgttcattcacctcaccttgtc

SEQ ID NO: 29572 - DNA, 572 bp, Arabidopsis thaliana columbia
caactacaccatatataacggtagatccattgcattcgtgtggaatctatagtgtttatatttgcatatatcatgtcaaatgatattttgctaatgtaggtaggtgacgccatagaacttttgaatatattaatatggaatcaatgcttttaagaagtggatggtgattatcatttatcactctatcatcccacgtttcatacacgctgcgacttatattttgatttacttttcttatgggtttggtccaattccaccgctaaacactatgcacaagtgcaaacaaatatttaattaaattcaacttccgatttaatcggtcattcaaatgagactaatgagtccaccaaactccacaattagatacccataaataaaatagaaaattcgaggttatcaacgtgcgataagatccactttttgggttatataataactaaataaatgaacaaaacacaaatagatttgactaaaatttggctataaataaatttgagtttcaaagaagccaaacccgtcaacacatcttctttaagcatctctctcccttcaaagaaaatatcacaaaaatg

SEQ ID NO: 29573 - DNA, 349 bp, Arabidopsis thaliana columbia
gtgaaagtaaaagacagaaggttaaaaacattgagattactaccaaatgccacatttttccattatattttctaatctctcttttatccttttttttttgaatagcctctctatgttaatttttcaactaagcatacttttctttaaacaatttccactcccaatgtactatatataagcgactaatttcaataataaaatttccaatttaaaacttaattaattggtaactcaaaagagatttggtgatggttaaacaattgtgactaatatacttcaaagacatccgtatcaaacacaaaacaagctccataatgttgatctagtacaaacaattgtgacatataaa

SEQ ID NO: 29574 - DNA, 540 bp, Arabidopsis thaliana columbia
ggtcagacttaccacgatcttgatacgcttttcggtactacgtcctttcgttctcatatttacctttacgatgcttccaatcttaacttcgtttaactcatcatcttctttgaatctacaacctcctcttattttgtacacttctccctttagcggcttcagttgaactacttaactcatcactcttctgtaccgactttctcctttaagttttggatctttcataccttgcacctttactcgctcgataatcctcttgcattatctctatcttgatcatcccgcttacacccgtttactctctgatcatgtatccttcttcgaacattaccatttgattcttaggctcagttttcttcccacatccctccgataacgatattactttgatcaaacttcaccttctcgattttttaattcacctcaccttgtcttattacgcctcctttttccctttataatgatcccgaaaaatatactccatctcctttcttgagcttcatcgttactcaccatatattgatttgtgatcacacttat

SEQ ID NO: 29575 - DNA, 294 bp, Arabidopsis thaliana columbia
gtatagaaatatgatgccttggtcccttaataagcctgtgggatataacctccagatcaatcttccgaaacatcagcagtaacagatatgaagtagtagctgatccggaaacatcatcagcagtaagtcagtaacagatcagtcggaccggtcacacgaagccaatggctctgccagcacctccttcagagaaacttccatcgtacctgatccaccaaaaccatgtgcaggctagaactcacgataccctaatgatcaagaccggatcgtactagcgtgacctcgtctacatca

SEQ ID NO: 29576 - DNA, 765 bp, Arabidopsis thaliana columbia
atatattgtacaatgaaaatattctcattaaaaataattgaaaagttaaatcctataagctaagctatttttcacaaaatgttctattttcacttatgtttacattagttaaagaaaaatttgttaattttccttttgtcgaataaatgttaattgtttataattatcttattatataaagtataattttcaaagttaataactcaaagttattatataataagatatgaaaattcttccaattctcatttgtctcctctatcaattcttttggctacagtcggcattctctctccccgtaatccggattccatcaagtttactcatcgttttgctggtccatatggatttggtgaaaattgagggaattgagaataaaattcatatggatttggtgagcctagagtaggagatctaccaaaatctcgatccactagatcgcaatcttaagctcatctttgacaagattttcttatcacactacttcctcccagaactatattctgctacagcttacagattccgacttaactatcatccaagccgattatcaaaaacaaacgatgaagacaataatcaatatagaaattaaaatgcgaatgggttttgtgaaccttgtcagtgagaaaaattcagaactatgggtgtcacgcaactaatggagtttttgttagtttcaattaattgtgtaataatatatataaactttgtattgtgggtataatcaaaaactttattgtggcaaaatagtgtcaaatcttgtaa

SEQ ID NO: 29577 - DNA, 581 bp, Arabidopsis thaliana columbia
acccaaacttctgtctctttgtttatgctaagctaatttaaatttttaaagtgtattaacatttcagagtctagtgcatgtttattttctcctagaaaagatgagtgacaaaaataccaaaagagaaaggtacatctgtaaaattgataaagagttaagaaggaaaaaatgtttaaatcataaacttaatcgcatacacaacttagcttcaataaatttttgaaaattgtcaaaactcaaaaatggggagaagaggttaaacttggtttaaccggttcgttcattatacttccgggttagcattttgagcggttcttttccggtaaccaaaccggatagacattcgagttattgttcaaccggtttcaccgtcaaacgacgtcgttgtcacagtactgtccctcacaaaaacctcacaaaacctctctttcgttctcgtctcctccagaaccagtacaaccatggtcgacggcgaagttgaaatccttcgcggttacgagctccgtctcctccggtgcactgtatcctttccacagacaggttctcctctcgaatcccagccgctcgatggaactcaatcc

SEQ ID NO: 29578 - DNA, 984 bp, Arabidopsis thaliana columbia
taatacataaatattgtttcatgtcgttaatttactgaatgtataattatgaatttgctgatgtggcatgattttaggtagtcttgaatttgctgatgtagatggtttgagaagccacaatgagcttcttttattagtaagagattggtttagaaatatttttaaagagaaatttctaacaaaatcttacatgtatgtttcttatctcctaccgctaccaccactttcctagatttattagcacgtgacacttttaggatacaaggaattgaacatgcatttgttagaaccgttgaataacaattcataaattatttttaagtactacataatttgtttccaatgggaaaagtaattaaaaaaaagaaaaaatagaaaaaggcgccattaaaagtagtaaccaacatatactttaaccgatggctcaaaaacttcgttctcttaacaggtgtgggttcctcgcaattgtctttcaaatttgcgagggaaatattcgtcgcaaagtttgcgacggaatagcgagttggtcctgttccctcgaagagatctattcgctagcgaagaagaggtttgtcggagagatctattcgtcggcgaagaagaggtttgtcggatagatctattcgtcggcgaatttgaggtttgtcgcagagaacaattcgtcggcgaatttgagttttattggagagaacaattcgtcggcgaaaacaaagaggtttgtcaaaatgaaagtgaaacctaattattcagtaggggtaagaccgttattttccatattcgaagggacagttttagaaatggccatcaggaaagggcattgttgcaaaaggttataccaaaatggcatttttgcaaatctcccttttgatttttatatctatgatttcacctgtagaatatcatcccgtattaatatcgatccaaatcattctgaccatataacccgtcctataaaattaaacattattttgtcttagttttata

SEQ ID NO: 29579 - DNA, 554 bp, Arabidopsis thaliana columbia
catgtcaatcacctgtaaactgaggaaacgaaactacccaattaccccatcctcgggaattctttatctgattgattttattgtttactctactatcgtttaatgcatattgttacctgttgcttagtttttgcatttctctcctgttactcgatctgatactcgaccaactagttgtctgacaacagactgtgcagtcgagtgtctttgtttcatttactgtctgttacttgacctgtcactagaccacacccagtgctctacaacgagttgtgtttgtcgagtgttttattgtttcagcttgaatttctgttttctgcgtgttcacttaggactgctagaacacaccaaaacctgttaatgcttggcttgacttactgacttctgatcacatcttgattcttggcataacacccatttggattgacaacctaaaatactacaacgacatgattggtgttttgagataattgatcttaaaaacctattatcagtttggcgtcgttgccaattgggtgtttgtttgttacatttaagattttagacttgcttag

SEQ ID NO: 29580 - DNA, 512 bp, Arabidopsis thaliana columbia
cccataagagtccataaacaataactcactttatgacaaagatttttttttttaaaaaccacttttaaaactttctgattctgattgagaaatcaataaataacttttaaaactttctgattttacaatatattttcagtttttttttgccttccatataattggccaattatagtaacgtgatagacagaatcacatataatctttaacagctgtcttgatcaatgcatcaaaagccggggccaattcaacaaaaaaaatagaaacaaatcttatttttagtcctaaattaaaataaaatcttattttaagatattcaataaatttcaatatattataaataaaaagttttctctcctatataaacaaatctcacaaacctatttacacaacaaacaacacaaatctttttctcattcatcaaaagaaaaaaccaaagcaaaaaaaactcaaaacgtttttgaagataatgatgatgatgacgaagatgtttgttcagatcgctgtggttt

SEQ ID NO: 29581 - DNA, 494 bp, Arabidopsis thaliana columbia
gttaccaacacaagccacagcttcaagcaaaggtctgcctttacgtggagcaatctacagggacaacatagtcgaacaaagccacttgtctagttcagttttcaaaactaaaacccaatataatactttgacacaaaagtagtagaacgtaattacaaaataaataaataaataaataaaaattgacccaccgcatcccgcagatgagacataattgtcggcaaataatggataagctcaccatccaaagcaccagccatttccccaagggcgatgaacccactggctctttcagccggtattcttaacacagtaagaatatgattcatgcatatctgcaagaaagtaattcgtgtcacgtttccagaaattttttggttttaagaatctctcagtcacttaccgttacatagtttgtcacaaaccggtcacggagaaagtgagcaatgcgaggcagtaatgaggtgatgctaaggcgaacaaggcgatcacga

SEQ ID NO: 29582 - DNA, 475 bp, Arabidopsis thaliana columbia
tgtgattctcctccacattaaccatgacatgataccacttacatcataaacacctaaataacaaatctatacatcaatcgattaccatagctctgttttttaaacaatgtaacacatataacctctagcataagcagttcattgttctccttatcaacttgtatcaacgaagagggaaagaagaacacaggaagattcaacattctcttaagcataaaacttaccagtttgcatcttcaaactggtatggttacaaagaattacacagtaactgcaagctgagacatgcaaacgctactacaagaagccactgtcaagttacattggtcactagtaagaagaaaacacacacaaaaagaaaagagaagaaaaattaaaattggagattatttattaaataaacgggtagctgaattgatatacattcagaaactcaagctaaaacaaaaacccctcaaattttgatcacaagggg

SEQ ID NO: 29583 - DNA, 572 bp, Arabidopsis thaliana columbia
ctcaatcaaactgaatataaagaaatcgagagaagaaaacataaatctaaaccggaatcaatccggccaaaaggtagacgaaacaccgaagataggcggtgaaactctagaccttagctagcctaccgccgctaaagaagccaatggaagccaaacgcaaaccgaccatcgtcgtaaagaaccgaacagtgtcagaagaaccacgacaatcaaacgttgccctaaacatcgccggacaaaagccagacatccatgctggaaaagccataagattctggacagagaactggccaacaaacactaaagaagctattgttgccggaaaaagaagatcagatgctttctctctctaaaagatgcaaatgagagaagagagagagaagcctacaaaaccttcttttccattcaaaacgcatagaatgctatcttctcaatactggatctgcttgtatataaaccaaattgtacatttattcatttttataaactgaagagaaaaccatttgattagttttcccagtgtttcaaaccggttgaccagtttgctgtgatcgaatgctaccgatttgagt

SEQ ID NO: 29584 - DNA, 483 bp, Arabidopsis thaliana columbia
caataagttgggttgagctttctcctttatgttgtcactaccctttgaccagatcagcttaccctttttatcagtgcttgagaaaattgtgatgaagagctgattcatcacatactattcctagtttaagatggcagctctgctttcattgaaaactagtgatgtaatctagtgaattttttttgtttgctgagactttcaaacctgtatatataaaataaataacataggctcaataccagtactttctggtaaataatgaagtttctgtatcacatttagaattaaatagccacattcctacaggatagaagcaagaaatcgcctatggaactgatgagtgaggttcccctatcaaagttgatggaaggattgtagcttgtgaaggaggtctgtatcctcttctcctcagtcgctcacgatatttggtttagtgatcatataaatgggcacaacagggattgctatataaatatgcttttg

SEQ ID NO: 29585 - DNA, 480 bp, Arabidopsis thaliana columbia
aaataacttcttaacaacattttttacctttcaattttatagggaatcagatatctttagctttctcatcttaatatggattaaaaaaaaatctttcaccattttctttttcattttaataataataaccagtcacacacataagtcacaattataattattctcacaaaaaaagccataataataaagaaaatattatatgtgtaaagattcacatttgactgctttaaagccatctacgcttttaggtttcctttaaatatatgccagccaaaccctccgataaaaatctcacttccaacatccaaatccctagaaattgtaaatggctgagaacaacaacaacaacggcgacaacatgaacaacgacaaccaccagcaaccaccgtcgtactcgcagctgccgccgatggcatcatccaaccctcagttacgtaattactggattgagcagatggaaaccgtctcggatttcaaaaa

SEQ ID NO: 29586 - DNA, 531 bp, Arabidopsis thaliana columbia
gttcacatcaatcgtcccttgaacaactattaaaattttgtattatagttgtcataaatatgtaaactaatataaaactgtatgtattcgaatcatagcaatgatttttttggaaaatcattactttgattacaaaacaaaaatgaaaaatcgtataacgtgaatgttatactactgtagttgaaatgaaatgaaaatattcttcttccatgtaggtagtcggtaaattgtactgtatttctgaccacaactttaatagatacgtcgaggagtaaatttgtcatccacgtggcccatgttatagtattccaccttcgtcaacacttcaccaaccatttttttatgccttgaaatagactaaaccctctctctctttttatttcgtcaacactaaaacacttcttatgttacgttctcatttctcaaaataaaatcaaaaaaaaaaaaaatgaactccatttattttactaatgtattaatttatctttaaaaaaaatggaagcataaagagaaagctaaagaataaaaatg

SEQ ID NO: 29587 - DNA, 531 bp, Arabidopsis thaliana columbia
tcttcaagatttgatgaacaattctgttgaaaacatacacaataactgtttttagagctgtagagaccattgcttacttttccaaaaacaaaaattgataactaatattggtttccttttgtgatatttgaagtattgtttcataagctattaatcatggttgaatgaaacaagatatcgttaagatcgaccgtgatgttagaatctgagtttgtcattcacaaataatttctgctacgctaaaaatcatatgatgttatcagtttatataaaagtcctggaatcagatagcagcacttttttttttttttggtcaaagagtcaagacatcacctgttgtatcattttgaaactgaatacagtaagtgtaacagtaatatactaatataaccgggggattaaatggtattcacaaaaataaaaataaaaaaattggctataacgtcccaatctcatctactttgaccgtaataattgacaaaaaaagaaaagtagggtgctaacatttattttattttaagcacagtgagc

SEQ ID NO: 29588 - DNA, 308 bp, Arabidopsis thaliana columbia
catcattcctcatatattatcaacttatccggtgttttgttttctttctgcgaaactgataatactccgcattagagactattcaatttctaacttttcacaaatcttgaatgttcagttttaaagtttgatccgagtcgagtctcctaggtaccgtaccatagattgttttgttttcgacgttatagagggtcttttctttggcaccactcctcagtgatagcatcgattctttacaaagaatatgactttgacgagaaatttgtcctctttccgccttttcctttccttttatcagggtaacggtc

SEQ ID NO: 29589 - DNA, 688 bp, Arabidopsis thaliana columbia
ttttaaaactatattggttacacttttgtttgatctctgctattaatatattgaagaatgagttaatgcagcaacagttggagaatctaagcagaaaggtcactctctaatcactctttttaaactctaatttcatctaataatctgattataccgcgtgtttaattatcattaccgtgttatgcatatgatcagaggaggatgctagaagaagataacaacaacatgtaccgttgggtgagtttggttactagcgaatgtcaatacgttttcacatttacgttggtataacatttttctacatataccgatgtttctcgcagcttcatgagcatcgtgcagcgatggagtttcaacaagctgggatagataccaaaccaggggagtatcaacagtttatagagcagcttcagtgctataaaccaggggagtatcagcagtttctagagcagcagcaacaacaaccaaacagcgttcttcagcttgctacacttccttctgagattgatcctacttacaatctccagcttgctcagcctaatcttcaaaacgatccaacggcccagaatgattaatacaattctcaatagatatctactctttctttatggagacagattcatgaacttttattacctatattttgataagccagtgtcttcttttgtgtggctatggaaaccttgtt

SEQ ID NO: 29590 - DNA, 620 bp, Arabidopsis thaliana columbia
cactgagaattgggcttcgttctgataaattttgaattaaggcccaatcacacaagtagaaacgcgctatcggcgataagctgtcgatctcgcaattttccccattcgcttatttcttcttcgaactacagaggggatccttgaacgccatgcagtttttctgcgaaagagagaaacatcgtgttatttagttggttgcaactagtaacgggatcgctaatcccataaagcgccacacagttaaggtgcagagagaagaacgacgtgttgttttaagcgtgaaaaaacggcgggccctctgtcttttctatttctctcttctcaacacttgcaggacagtgccctcacggataatatggagggttagtcagatggataatggattatcaattatgtgtagccacttggctacttgactcagtgacttagacttttcaggtgctgtgtaggtatataacataaaggtcccacgtacatcatctacataccattccaaagagatgtatatgtgccatcgacaatttcatgtgaagtgcgctcgaagttgttgttagcatctagtgcatgaattctttcagatataacgatatcgattacagtttatacatcaagcagagcat

SEQ ID NO: 29591 - DNA, 563 bp, Arabidopsis thaliana columbia
taaatacttcagttattatccgatatcttaactaatttttcgagctatttttttacttccttcagttccttgcatacatttgagcgattatcataatttttggcacaataatttgtcaagaattataagaatatacaatgatttattcatcgctaggatggaattcaaaaaagtaaacccaaggactagaattacatagtttgtttcatgttctagattctcatacagaataaaaactctttgtaaaacacattgcaattttttgaaacggctgcctagacgttggcctattagacgatcaattttgttcagtttactagatttgtgcaaacgattgttctaatatgttatttattgatgacatatttttaattgttaagaaaaatttaattgccaaagaaaacagtaaacaaatgtatgacttaattaattgagagagaactttacaaataaccaagaatattcaagtttggagaatttgactaacatgcatgagcatatatatagggataatgagaaaacttaagtatttaattgtgatatagataaatgacatattatag

SEQ ID NO: 29592 - DNA, 670 bp, Arabidopsis thaliana columbia
cttaaccgacaataaataactcaaccataacgtttgataactcggccgtaactgcatgctattatagtaattaatcttttgcaactaagtcagccgtaactaggctgagttatccggtaatccagctctttatggttgatttataacacttgatcataactcagccgtaacaacatcccataactaacccgtccttcataacccagccagccgaaaaagataactcagtcgtgtcgaggaaataagtctgatattttctaataacttagccataacgttgtctgggttatgctcgaaattcttataactcagacaaaattccttaactcaactgtcatgtaggctggattatcgcataactcagacataatttttaaatcagtcgtaacgtatgccaagttatactcataattccaccgttttctcatgactcaaatacttttgtcgtaagtcagccgcaacataccgtaactcagtcgtaacggccgctatatctcgttacggctgagttcattaatccacgttagcgatttctgacgtggcagtggtatccttgtattacgttttttcttgtaaagtttggtatagacacactgagtatcaaaaagacgaaatatgatagtaataaaaaatattttgtttggtctggtgaataacctaatttatatac

SEQ ID NO: 29593 - DNA, 826 bp, Arabidopsis thaliana columbia
tttggttttgattcaagctcaaggacctcatcaagatggataagtgatttatgagtgctctttttccctgcctttggttttgtcctactgggttttccaaaggaaggtttttaatgaggcttatgttttcacttcatataatccattttaatgattcaaggcccaaacccactaaaataaagagaaactttcgtggcctttaaagttgaggagtgtattttaaattttaaactttgtttttaatttctgttgtgttctaggcagccttggagtatgttccaagacttgcctcttcatcttctcttctccttctctttatatactcttgtattctcttttgaggacttatctttcttttaatcaaaaaccttttctaagaagatcatcttgttggtgtgtatatccagcaaaatccttagtctcttttggtgcgcatatccaaaggatctaagtctcgatatcttgaaacccttccgcaagcttctgtgatatccatcgattcatttaaatctatccatcatcacggcatcacagccacctctatccatttctcaacctaagagtgccgagtccttgggaggatctcatcatgtggtatcagagcacactctgaaagttgagttttccatcgttatcattttgtatattttcatctttagatctgtgtccgtctgtcaccttgatttaattttcataattatttggtgcatgctaaaattgcgaaattaactgtcacgggtttgaaaaatactctagtattttttaaaattgtttctggaatttttgggaacgttatgataatatttagcatccgaacaagtgaaac

SEQ ID NO: 29594 - DNA, 646 bp, Arabidopsis thaliana columbia
ttctaacacacagggagatcacaagacacactctttgtctctctagaatccaatcagctaaacctagtctctacaatggaaaagcgtgcactagctttttcactcacaatcacgaccaagtctaacaagaactttagcacctctatttataccatcgaggtcttcggtcttctaggttagccttcaagatcttggatcactccaaatcttcgcgtgaatatcttctttccaaactgaactcctcctgttgtggtctccacgtcattcgttcatttggcggcatatccacgtcagcatcaattacttgatcttcactttagtcttctgaaacagcttccagcttgttccagcaatcagcactccttctggtttgtcctgacagagggtgcactaacaatctccccctttttgatacaatttgtcaattcaagcaatcctgcaagaaatccctcaaagaaaactcacaagcacacatcaagtcatagagataataagcagcggaaataaccaatagagggtctcatcatagattgcagaaataagttttaagattcaaaacacatcatctagtacttagaaacaaagacctattaaaaccaaaaggacatgattaacaaacacaacttaaaaactcccccttaatcct

SEQ ID NO: 29595 - DNA, 975 bp, Arabidopsis thaliana columbia
catgcaaaatatttgaaaacaatgtgcgaacatatgattttcgccccgtaatatagcaaagatcacgaaatgcacgacaaagtacattaagatcagaatttggagtagaaaaaaaaaaacaatagaagaattccattttccttcctcattcatcggagagctctctttgggctttccgaaaaggtatcacataccaagtttggcctcatggtctaaaagttctacagtcatacatttttaacaaaaacaaaagagaaaaaaaaaaaaaaaagagggatgcaacacgaggactttcttggaggtcacccatcctagtactactctcgtccaagcacgcttaactgcggagttttgataggatctgatgcattggtgctggtatgatcgcatccgttaatacatgcaatgcaatcgtatctattctttttgacgactttatgatcgatttgccatggatcccaccagctatgtaggaataccctatcttatttataggaggtttgatacatgcaaaatattcgaaaacaatgtccgaacatatgatttccaccccgtaatatagcaaagatcacgaaaaggcctgaaaagtacatttaggtcaaaatttggaatagaaaaaaagccaatagaagtattccattttccttcctcattcatcggagagctctctttcggctttccgaaaaggtatcacatgccaagtttggcctcacggtctaaagttatagagtcatatatttttaacaaaacaaaatagagaaaaaccgaaaaaagagggatgcaacacgaggactttccgggaggtcccccatcctagtactacacgcgcacaagcacccttaactacggagttctgatgggatcaagtgcattagtgctggtatgatcgcatctgttactacatgcaatgtaatcgtatctattcttttttaaagacattatgatccatttgtcgtgggtcccagccgactttcg

SEQ ID NO: 29596 - DNA, 440 bp, Arabidopsis thaliana columbia
ccaagttataataatataaaccaaataaaattcaactgtaacgttaaaaaaatagtttgacagatttttacatattattgctcagtaggtttgatcgaatgcttttatgttctaagagatcatccagttttcaaaatcttggttaaaaatatgaaagttagagattaaattaagagaatcgaaccaaacaaacctactcaagtggagaaaccgaagataagattgccggttccatgttcccctaaacccaatctcaatgctttgtcttctttcaacatctctcctctatttaagcccacctttctcccttttctactttatcttcttttctttgagttaaatattgtgttgaagcctattaaacaatgttaaccatttcttgtgagggttaaaaaaacaaataatatgaataaacagctgtgtttaccgcgtttcttaca

SEQ ID NO: 29597 - DNA, 984 bp, Arabidopsis thaliana columbia
tattttggggttaggtgtggaactggtcattacatttggtggtgatctcttgagatttatcaagaaatgaatatgtttctgccatgtattcttggccaatctttgcctgtaatgactatatatctcacaacatgatttaacaaaagaaaagaaaagatatttcgacatgatttagcaaaacacagaacacgtgctgaataaaactagcaagggtccaacaaaatcttacaagatacaacgttttcaattgtgtaacaccgaagacaccgattttaaagtactagtggccaagctttcaaagagtagatgtagcaatggaaaaggaatctcaccagtcaccagaaaaagaaacaaggagaaagaaataaaaaagaagaggtgaatcacgtggcggtaaaacgttcgttgcatccaaaacgctgtcgtttttaaagtgtttagtgttgccgtgtaggtgtggcgttggaaccaagcgtatacaacaaagtcttgaagcagagaaagaaaaaagaaagacgagaggcacacaaaaagagatacaaaaccaaaactttcaagcaaagcaattcaatttcaatcaaaaaccaaatcgaagatctttgaaagtttcctttttttccgaaatctgagcttgggtattgttggataagcttctcggagattgagattgaggattttgataggtgaggagattgaaagatttggatttttgggcggcaaaaatggtgatgcagacggaagctagggttggtgtgagctcaggacatggcgtacttcgtcttctcatcgtttaacgcaggaccagagatcacatatcgaatcggcgtcgcagctcttagccggagactcgctggtgcttttacaagacttgtactgctcctctatctcgtctcaccattctcttccaggttcgtcatttcatcgagcgagaagaagaaaaattcaacctttgtgttcattacaacccaatttgttgggttattg

SEQ ID NO: 29598 - DNA, 501 bp, Arabidopsis thaliana columbia
gaaactaaccggaaataattacggctattctctacatcagcttaggcccataaaaagcccattagccactcacttcgaaacgacgtcgtcagataactctggaagcaatcagatagtcagatgtttgtttctctattcggctactcatttctcttttaatctcaggcaggaaggtgaaatttttcgatttcgtagatcaaaatggcggcaccattcgcgttgaggaaaatcggtgttcctccgaactcggcgaacctgacggaagctcgccgccgtgttttcgatttctttagagctgcctgtagatctatccccaccatcatggacatttacaatcttcaagatgtcgtcgctccttctcagctccgctatgctatctctgctcagattcggaataacgctcacatcaccgatcctaaggtactttcccttaatttaactctgattaatacggacccaggtcctatgcgatggcgaaattgaaagcattttccttgtttg

SEQ ID NO: 29599 - DNA, 551 bp, Arabidopsis thaliana columbia
atccactaaaaaggaagaagcaaagagcaatgagctctgcttgacttacaggttgcttaacagagaatttcagactttctgccacccagttcaataagtcatcatgaacagatttgtcttcagatgccacaatattagcttcaatgttcacccctccatgcatttgaccgttttcgtgaactccatttgtagacaaaccattacaagaatcggtccctttctgcatttgaggcttcactgtctgtagaccttcgacactgacctatatttcccggataaaattttaaaggcttagtaccacaaaatggtccacgatccttatggcattcgtaagacaccagaaagataaaggctgcttgaagaattacatagggtttttctaagatcaccaccaaactctccttaaagtgaagtggttatcattaacctcagaaagttcagggaaagaaattgagcagtggaaaggagtacagatacttacaataattgagtccacaggatacttgtgagcatccactggttttctgtccatttgaatcacgttctttggt

SEQ ID NO: 29600 - DNA, 490 bp, Arabidopsis thaliana columbia
atactctttctattgcagggtgctcacatttgtcttttctgaacctctgaagagactttcattatgtatctactggattctgttgatcgttgtgtctgtctcacgattttataacatctcgaggagtagcaaggttgagagaatcttgcttcggaagtactaccatctgatggctgttttaatgttcttgccagctcttgtcttacaggtaactggtgatcaataaaaacttatttcactattcagaaaatccgtatgtgttagcctgctcctctagtagcttcttactattttcatgtcatttcatttcagcctaaatttctcgatctagcatttggtgcagcattggcagtatttgttgcattggagatcattcgagtaagctcccttcttttgaaagaaatctccttctatttttcattgctttcgatggggttaatgcaagatactcattgtgaaaccagatatggagaattcagcctcttggaga

SEQ ID NO: 29601 - DNA, 537 bp, Arabidopsis thaliana columbia
tagaatacattaaaatataagtaaaatataattttatttattaagtatatatatatataaatatatattaatataatattttattttgccattctgcaaaatgtatccaatcaacatattttagaaaaaaaatcattcggaaagttttcatactgcaacactgtggcattcattttatgcaattatgcaatgttaccaatcagaaccaaatttttgttaactaggaggagtttggacctaaatcttaatctccctaatagtaaagacccgcatttgctaataccttataacatagcgtaaagcatacctcctaccgaaaatcgaactagggagcatatggatccaccttctgcacttaaaccgttagtccaatgcaccattggtaacataagggaacatatggatccaccttctgcacttaaaccgttagtccaatgcaccattggtaacataaatcatgttgcagacatcataactatcatactctattgatctggttgcagaatctgaacgttgaacgatgtgcaccggtattga

SEQ ID NO: 29602 - DNA, 610 bp, Arabidopsis thaliana columbia
tcgcaacttgttctctcaacctgctagcttgttttctaattgcatccattcttcaccagatcaagagctattcacaaatcttcttccttctctctttctcctattcttccactttacgagttccctccgattacttggaacaactcagagaagacagagattcgaaatcgtcaaaaatggcgttgagctcagaacaaatttctctgctttcgaacacgaagaaatcaaagatagacaaagtctctgtttcaccaagaaggttaatattgggctctctataatagcccattgggcttgaaaataaaatccagtaagctataaatttatatcatctcaaaataactaaaaagacgcaaaaccctagacatatataaatgaaaagccagtgaattagggctttctctcacttgttgaagccgcttcttcttcttcctcactgtagctcgtcgtcgctacaccatctagaagacccttaaccatggctgtcgggtaaatctctcttcgcatctctatattccttgcttgtttctccagtctctgtattggaatctctcatttgatcatagcttcgagtatatcatgttctgatttaaggtttttgtttgatcat

SEQ ID NO: 29603 - DNA, 553 bp, Arabidopsis thaliana columbia
atgccaacgttgttgattttcttgtatggttgtgttgatcgggtaatcgactttgggtgattttgaataatatagtattagagggtataatttaatactactttatttccgtttacgtagtacagtttgtttttgggggaggttggatctcggaaatactagccggtgacttatgagggtctttttaaagtcttaaggttgtcaataatttgcacaaaaaaaaaggttcttattaacaaaaaaaaaaaacttagtttcttaaaaatatttgatactgttattagtttgaatcattcattaataagatgctttatcatggaatctgatttccatgcgtatttaaatggacacctactatgttgactttttcaatggtgtgtgactgtgttgatcaaatttaggataatatggactatgctatagtaattagggggaatatttgtactaccttatttccgcaaataccatccattgtagttgagttattttgtgaggacttcctttaatcttaataattggtcctacagtactaatatgcgaattgatagctaga

SEQ ID NO: 29604 - DNA, 552 bp, Arabidopsis thaliana columbia
ttacaatctactgataaatttttaaagtaaaaatataatcgttttattttatatgaatgaaaaatagtcggttaactacatttgcgtgtactaaaatgctgataaatttatataaaattaaaatatatctcgtatatatttataatgtatgacatacatataggtgatatatctaatttcagtaaaataagtcaaactgttatatattaataaggtatatttaagtttagatttactaaacgatgtcaacatataaaaatcattgagtacgagattttaaatttatttttctataaaaataaaaaaaaactttaacaaatgataatataaagtatatttaacttgtccggtataaaattaccgttataataaaaaataaccagaatgcgtctcgcgccataaattcaaatattctttaaattgttttacattactttccatttttgtgttttctttttatacttgaaatatctacttcaataactttaatttaattttgataccaaattattatagccttcacatttgggaaaaaggagtaaaatagggggt

SEQ ID NO: 29605 - DNA, 507 bp, Arabidopsis thaliana columbia
aactgattatatctatacagccttcattatgatgtcacaagaactgaaagcttcagttttagagctctttcggaatagttacaacctctctctctcgaggaatttggtcgtgtgtcaaacgatcaaaagtattgcaggacagcgatcatatcttcacacgacattatgaaaaaatattctctgccaaaagaaaagcttcttcttcacagacacaatgttctcctgcaaacatgcaagtcaaatatcaaacaccgttatggaggagaattctagtctaccctatttttccggggtgggcagaaacaaagctttggccctaattgacatcttacttaagcatggtatgagctaatgcattgcatgtcttttctaattttaggaattaggaccaatacttcggaaactggtgaatgaataccttatcagggggctccaatgccgtaaatacaatcttttttgcaaccttctctacaccccagcagctattttagcttcaggacttgcctt

SEQ ID NO: 29606 - DNA, 986 bp, Arabidopsis thaliana columbia
ccgatctattaatttgactagagaggaacgagctgtatgatatatctgcttccgaattgagtctccatggctagtggaagcagcagcatcgcaatcggtggtttgtttgagaacgcggaggtgactacgagtggtagaccagtgcttcgtcgcaatgaggtcgaatgtttcctcctctcctccatcgatatagattccgaagatgatccgccgcgattcacagctttgaggtctggaaatctaatccttaccactcatcgtctcatatggattccttctcaatcaaacgaatctgttccttcttcgattccgctctccgccgttactcacatctattcccataagaaatcaatcaagtctatgttccattcgcctagaatccgatttcaagcggatcccggttcgattgttgtaacgattgtgtttagagggaaaggggattttgatggctttttgtcgaaattgtgggaatgttggagaggtagggcatgggaagaagaggagaagagcgagagtgagacttcaaagtcaggatctggaacagttgcgcaaggtttgtatggaaacgatggaacggtgaggatggtgggattggctgggattttgaggaaggagcaagaacagtgggagagcacagataagagcttgcaagatgcttttcaggatttgaatgctcttatggtactactctttttcttcctttttaccgatgtagatcatgtattgttataccaagttacaaaatttatggatagaagataagtctggaacatgattttcttaacgttttggtggttagtttgctctttgtgatgcgtgatcttgaagagtttatttgcaactgttataggattactcttaatcagtagaaggaaaggcttgttatttgattatgggttttgtgatcaagacaaactgtgtctaagttcttgtccacttattgggtgtacagagtaaggctaaagagatggtgagtctgcagagaa

SEQ ID NO: 29607 - DNA, 455 bp, Arabidopsis thaliana columbia
cgaaaaggtaatgcgattatttacttcattcaacatattaagttatgtaaaaaccagttgcagtatgagagctcacttacccaatattttttttgtgacaaccaacttttgtattaccggtagttcattcataccagtaaatatttttcatgatctgtcttacatatgtaaatctttgtcatgattcattcactctagagactttacgttcatttcattatttacagctaaataaagaggtattccaactagcacaagaattagagagggcttattctcggattgaggatcttcaacagattattggagaagcactcataacaagagatattatcaacagactcatgaacagactaacacaaatgtacgttaatatcattttattttagtttcacaggatgataagcctttcaactgcccgatttataatcctgtttttgtattcctccaagtgg

SEQ ID NO: 29608 - DNA, 602 bp, Arabidopsis thaliana columbia
  unsure (1)..(602): unsure at all n locations
tccagttaaacaatatactttatgcgtagtgaaacggttatacaaaaaataaacaaattacacgatattgagattttactacaacaatcaactgagattgatacgacttaatagttaaaacaatatgattttccgaacactagaacgaaaactaattgcctccaagaactattagtcatatgtgcttaactaagttttctaatagcaaatagtcacattattgtttgtattttcctatatgaataaaaaatttcagttcacaaacaattgtaatttggagcaaggttctacttaaaattgaaatatataaaaagaggaacagtatgcgattaagaaagccagagaagaaaatagtattttttcttaattttttttcccaggaggaaaatgttctatatattacccgttttgtccccacccccccaaattacatatcctcttttttgtttttggtttcacgctattccaaccctaccctattcaacaaagaaacaaaatataaaacacccccaccataatctgacccaaaattcctaaggaaacaaaaagcaagaaaacttggcacccttttgatcttatgctgcattaagtganaagaagtt

SEQ ID NO: 29609 - DNA, 554 bp, Arabidopsis thaliana columbia
agagacgaatctcgtttcatcggatattacttgtctcatgttttcggatttttattgaatcgtacgagactttcggcttttgaaattctaatttcgttttggaatctgtttattattctctgtaaatctgtccaagttctctgttagattgctgatgtgattatacacttaggttcaataatcattttgggtctacaacgaatctcctagtttatgctttctctgatcaattttggatttgtggatgatgagtttgtcatttattgaatggactatggattattcaccggcagagttgttcatatcatgttgattaacagtttactgatggaggagggtttaattttgtaatcatcatcacatataagtatttgaattatttatcttgtgtagacactattggattagtagactatgactttgtcattattcaattgactagtatttgtgaatgctgactcaactctttgtttctttctcattgatttctgctaatactttttgtaatgttgattataaaaacattgtaagatttagtatttgagtaatttatg

SEQ ID NO: 29610 - DNA, 1273 bp, Arabidopsis thaliana columbia
tacccttataaaaacaatatctatagaaactataataaaaatttactagttctttttttgtcggtgaatttactagttctatacgtttactttactaaattcttaaatttattaaacaaataaaaaatcaacctacaaaaagagaagaaaactagagttttcaattatgtaatcacacacatgcatgagctgaaaattaatctgggcaatttctagtcattattgtttgatgggctgaaactgtttctgttggatttgggcttacatcaacgtatccccaaaaccgattagattcgtaaaattgaaatgcattggggttgagaaggccaaggataatcaataattgattcccggtttattcataaaattagattcgtatcaccgaaaccaattatattcgcaaaattaaaatccgatcaacataaaccggtcgggcaattccaattttgatgctccgtttattgagcgtttattgatctgcgactgcgagatccatcttcttcttcttctccttcttcttcttccaacgaatgttcctatgatctctgtgtatgaacagaatctgtaatcagatccattgtagagagagatagccatttcaattcgaggtagccaaagatgtatatggcttacgggtggccgcaggtgatcccgcttctacctggatcgcagcgagtcgtgtaccttaagctcgcggccggctattactggtcgtttctccgtctcacctggagctttggggttcttctcaggtgctttatcatcatctctctgcatttcctagtaattggagtctagagttggttaacttatatagctttttgtttgattttcccgcaattagcaacgagtgaggttgggaaagtatatgagagatgacaagtcgttgcgagaaggagagaatttgcaagctgtgcactttgcactcgttccaagttattgtttgtgttaaattcggatgggcagctagtagtatgctctgtgaataagaaaggtttaaagtacactgagagtattagagctgagaagaagttgggtggtgatgctgtttgtgcatcagtggcttcagagcaacaaattcttgctgtgggtactgtgagagtcgaaactcgcacaatagaatttattttaagggtttcttcaaagaacggatctttgtgagatctcaaagaacaacagaattctctattaccgcggacggtgttcttgattgtattaatgagaaagcaataattttatcgtacaagtgtgttagaatatgagaaataggtgt

SEQ ID NO: 29611 - DNA, 523 bp, Arabidopsis thaliana columbia
ctttatattatgatgactcgagtctctcaatcagtagtgtgaacacatatcgctttatggaaaattcgagcaagtagatctcaaggcaaaccaaacattcctacaatatccacctaaaacttataaacccaaattaacaaatccatctatatatataaaaaggtatacaagactccacacgttaatgtataacacgttaaaagaccacaacactttcttgtgtctaaaacaaagaaacatacaacccttatccaaatttagaatttattatacacacacacacacatctaagtaacctaaaataaactttaataagtagacacataattgatatatcgtgtgtacacttgaatttgccaaatcatattgttaggtgaaacaattcaacattatgatgaggaagaataaaatttgaacaagtttattacaataaaccgaataaaaccagtaatctcctccattccaataatcagataaccaaaacttatacattatctattttataaccgagacattaaaaata

SEQ ID NO: 29612 - DNA, 841 bp, Arabidopsis thaliana columbia
  unsure (1)..(841): unsure at all n locations
cgcatatctcagaagagtgatcaagttctatcgacacctactagggcggaatgctttggtcgattccagtgatcagaaagaataagcagtaacacaactagtcttgaagggttcaatcaattctaaaacttgaccattctacagactaaggattccacaaccactctatcccattcttaagaattctatgtcactactcagataacatgctcaaagacataaacgcaggtaaacaagtatattgcataagtaaagagataaagagtagagaaacaagatgacagatgaaatcaaatgcggaatcttgaattaaagataaagattaaaactgaagcaaacactcaatgtcgactagatgtctcaggacaaaacccttaaacacctatttatacaaaacaaaataaatgatagtagatgggtcgggaacctaattgcccggcccatagagtgatcatgggccgagatgggcttcgtgatcggatgaagctcctgaccgcttccaaacacttcttcttctcctcttctcttccttgtgctctgcttgtctcgttgagtgtggatttgagtagactctgaagatgtggtcgagtgctcgaacgagtgatggcgatgatgatgaaggatatactcgaccagtgggtcgagtaaggtggtagagtgtatggccgagtggtggtgagtgatgatactcgacttcgtggtcgagtaacgtggccgagtgaacgtcagagtggtggtcaggtggtgtgacaaagtgtntactcgacccagtggtcgagtggtgtcatcgagtggcctggagtatggttactcgacagggggtctagtgattggtaagaat

SEQ ID NO: 29613 - DNA, 575 bp, Arabidopsis thaliana columbia
ccgattgaaccatggttagactccctggaaagctgatctccggggcaatccgggaacacgtcacccggttcattggaacctgacgggaaatcgccgagcaaataaacggattggattgtcttggcttgatgagcgttcaccgaaaacttggatgagtaatatgcgaagagagttgtttgtgtccccctacctggcgcgccaattgttgattctgaaaatcacacaataaatttgtttaaagggggtaaacaaatttacttaactctctctcgctatttagtgaccaaagattcaatgaaaagaagaacaaggttgcttagagacaaagttagggttttgcccaagaacaatgaagaaaactagggtttttagtattaaatttcggatcccccgaatagaggacaaacccctctatttatacactattaagacggttaaaagatttgttaaacttctatttcttcgaggattgaatcttctaatttcgtttatctccaaagacttcctattttcacaggagaaaacttctgattcctcgaattaggaagtcggctagacggtctccttacttcggg

SEQ ID NO: 29614 - DNA, 483 bp, Arabidopsis thaliana columbia
tatggttggtttgtttacataagtggtgtagaaaacaaggtggtgtgatgcttttatatatatgtcaaattttagacatctttctagaaattaattaaaaaaaaatatcttgtttaattcgtggattcgtttaatatttttctgaagtagttaaagaatattgactagggaatggacgaattttagtttatttacaaaataaaaaaaaataaacaagtgtggatcttgtgtattccatgtgtgaagtactatcataatcattgcgtcatcgagtcgtatgatttacggtgaagtcatattcacaactttttctttttaatatctttctgaactgaaaaaaatcattttagggtttaataagtttttcttgaagattatgcccattattcttctaaattaagcatattttgttacaagtttgagaaatttgaatcattatggtggtcgagtactagtccatttcaaatttcaaaatgttgtata

SEQ ID NO: 29615 - DNA, 468 bp, Arabidopsis thaliana columbia
  unsure (1)..(468): unsure at all n locations
cgccagtgtgctctaaaggatgccctgcgtgacattgcaacggcgacagtacagtctggatgcaagaagataaaagtatattcgtggtttttgcgtggcctgaaatgctcatttgtcatttcagaccatttctgtctcatgggataagtcctatcttgtatgcgctgcgtagtccngtatcaaaggtatattttcttggaggtagtcagatgagccattgaaaatatatgaaatcagcaataaaactgcgatacaaaggcgctggttacgtgcacgggaatcatctggcaggngnagttattgcaaaagatcattacattaccggacaaggttatcatcagttttccggtggttgacatgntgcgcagacatgctnttaacaactgtagagaatccnntgtaggagagacgatttatctaagacttgaacgatgttgtccgttagggaaaagacctccctgtatagat

SEQ ID NO: 29616 - DNA, 511 bp, Arabidopsis thaliana columbia
ctcttacttatttatgaaaattttcgctatttgctctcaattcaataggcaactttcggtcataagtaatggatgtttgtattgactagatttgtcataatcattgttatttaactacatattttaaaaggtatgtgaacaatgcaaaatgttcatcctataatgggcttctgggcctatttaaactggattatagatcctcccgtagactcaaatataaagcctactcattttaagaacattacttctttttttctgcaacaaaaacgttacttaaaccaaagaagaagaagattcaacaaactcaacaagaaaatggaccaataagaatcgaaagcgcagatcgccacatatgcataatcttaatcaaaatcaaatatggaccgtcgaacatgcctttaatcgcacgtctatcaactcctctccccaaaattaaccgacctaattctcacacctcgtcactataaaattcactaatcttttttacttttctctacatcaaaacacaaca

SEQ ID NO: 29617 - DNA, 1408 bp, Arabidopsis thaliana columbia
cgctaaggatttcagccaagcctcgcgagttgaaaatcctaagtttttatagtttatattttgttttttttgataaatatttggaattagtgatagatatggtcttcctaccttgttggagttgataaatatggtcttccatgtgataatatttctctttatttaactttttttttttttttttgacaaaagcatgatttcattcattcaaccgaagcaaaatattacaaagatagaaaagagttcccagaacatcaaagctttgaaactcaaagacaaagcacacgtcgatgcaacatatagataattaggataaaacgactgtagatccacaaacaattggagacatgagctaaagagcatcttgccacaagcaacgtcatggttggtcgcaagcacttccacgaacaattcgggaggttgatgagtggtcactgtcatacgacaacgtgacgttaaaaaggactccataaccgtaggtctcgccgggtcaagacgcattacatcttctacacaagtcagaagaatggttaggaaaaacagacatgaaggaatggttctctccataaaggagaacaactttttctctccataaaggaggatggctgcatcaataaaatctccataaaggggttgattgcaaaccgcagaccctcaaggacgagtagaattcgttgaagagctttaatacaaggatccaagacttgccaaacacactcaataggttgcgagacggtaggaggccaagtcagggattgaacaagtctaacttgtggttgtttgattggggtgcgtatgatccagaaggaagcgatgtcgtgcgtcctcgacaaactctccgaataagacgcaagtaacggtccaagatataatcctgtcgttaacgaaattcgaagagcagatccttctggaaaaagcttgtaatctatatagatttgattgagactaaaattcccgtatgaaaaccaacctaaagatttctttagacccttaccatggtaactaataggccaaacagaaggtgtcgctactttgcaagattggagtccacaaccaactaatacaaaggaactagacttaaaacaatttgggcttgaattagcttttaaaataacagacctgggccaatgtggtgagtaagttgggcctgaacaatcattgggccttggtgagataattgtgaggttaggatccagctggcgaaatgggtccggcccgtagagagagaacaccttcgagattagggttttgccgctcgccgtcaccctctccgtcgagccattgctcccaaacaaaaagcaactctccgatatctcgactttgagacatagaggatcaagtagaagcgcatggagaggtgaattccttactatcaccgatgttcagtgaatcggtgcttcagaggaag

SEQ ID NO: 29618 - DNA, 634 bp, Arabidopsis thaliana columbia
tatttaataatactttataattatggtaattcataacattttatacatacattattttgaaatatttttttaaaatagatgtgcaaaaacaaaattgaatatattatcaaattgttgatcgagtaattgatcaaaactttactctatgacatcgtaaaatggaatacgggacgaaaaagccatatcgtttgatagcttgtggtagaaaaagaaaaaaaaaattaaagaatgaaaacaaaaaaatctctttattttttgttaaaaatatgcgtccaatcacaagacgacaagtgtcagactctattaaattctcaaagctctctagagagagtcaatgctctcaattataatgagtttagaaatatttttttgaaataagtgagagagaattcatcaaaaaaataaaaattgaatagaactccccattgttgatattatggttctcttcttgttgttgttgatttagactataatttgtaacgctatacctaatatatgtgttgctccccattgttgtccttaaggagatgctatatacatatagatactagccatgcaaggatcattagaaaatgaatgtgattaaattacaaatagacccttcgaacaatgagaatctcatggttattgttat

SEQ ID NO: 29619 - DNA, 384 bp, Arabidopsis thaliana columbia
aaagaggataacactatttgacagctgccccatggaaaggcacgtcccagccgttggattggacccaattctgtaattacacgtgtcgatatctcaatcgtttgacttatgcggcattttggtgttgccaagctcgttttttccagctataattagtttttgctaaaaagcagtcatagattaagatgtcattctaattttaaaaagacaaatttccttgagcggcactaatatctaattatcgaccattaatgtgatgattcttatttgcgttacaataattactgtcgacacatgttgtagttcttagtttgtgtagtttatctagttttgtcgctaaatttcaatttcaattaagtgtacatttggactgtaacaagcata

SEQ ID NO: 29620 - DNA, 831 bp, Arabidopsis thaliana columbia
tgtattatgtatatggaataagatgaaataaatacacttacgacgatttaattcatcagattcagagtatcaaacatattctctcctctaaaattcaccaaccctccttgcggtttcagtcatctaatggcacattaatggaaaatagtttaagccgacacgttaatacatagctagccttacctatgtcaaacgtccctttatatatttcatttagttttttttttttaattataaatttggttaaacaacctatatgatgtcaatacacataaacatgtatataattatatatatatatatgtataatataaattgcgttttgttttccagatatcaacaatacacattacacacacatttcatttctcctaaaatgtgtgtagtgtatacttttaatatggagctttatcaaatttcaatttcataaacaagagacaaaccacagttattattacttgatatggagaatattttttcccttacatgttaaaaaaagaaaatgacatttaaagtaaatatttcaaattcctatgtaaattaacatatactactgaataaaaataaataaaaagaatggtaaagggttgtttaattttgtcattgggtgaataagcaaatggtgttggtcagtgcatgagcttcacctgtaagctgtaacgtctttctctctcacacacataaaaaaggaaaacgaacaaaaacataattaaagaaagaaaaagttattaaaatcttatttgacattatatatatataggtgcacaactaagaaagtaaataagatttcatacgaaaggatcgtcgaaatgtttgtgattggagtggtga

SEQ ID NO: 29621 - DNA, 542 bp, Arabidopsis thaliana columbia
tttgtagttgctgacgtggaggtagcatctggtgaggaagattggacccagatgatgtgcccatcaatttagtgctgcagacaccaagataatgtcaatgtcagattcaccccaaggaacacataaatccctataatactttacgaccaaatcacatactaattcaggaaagcccaaaacattttgcaaaatcccctagaaatccaccgacagataaaaactacatctcctatgttcaaattgagctgagatgattaatcactagtggaagctcaaaaaatacaaacacatgacagagtaaacacaaaacaagcgctagaaaaaaacaagttgctcgaatctgtttgccccgtagattatacgctataaaagtcaaacacgaatcttcataaaatcagaaaatcttgcaagtaccaaaatacatagtcataaactgaatcaaccctcaaaacaacgcatccaactcgatcacgagagttattgactctttttgtcccgaattttcaggaccagcctcgaactcaacaaccaaaacagatacg

SEQ ID NO: 29622 - DNA, 429 bp, Arabidopsis thaliana columbia
agttgagtctcgccttgtcaagagtgatgagaatgtaagatttgatttggctaatagagaacggtttgtcagaggtggtagatagattggtacgggccatcgttgagaatagagagtaattaaaaaacaaaaaaatataaaaagaaaaacaaaaggtttagatgacgaagacagatgatgaagatagtaaaaaattcgaacgagaagaagagaaaggagagacgaagcgagaaaaggggagaccaaaagaatacttttagaagaacaaaggctatgataccatattggataataaactctcttgactgaatcattatgagagacacaaatatatagagatacaaagagttctagaaaattctatataagagtatatatgaaaacatgcatatcctaacatgttatgcatactataagcttttcttcttg

SEQ ID NO: 29623 - DNA, 467 bp, Arabidopsis thaliana columbia
tctacaacctgtatgtaaaacacctggtttcccttgtataaggctggagaaatcttgctttcaacttttattggaaaccttttggccctaagaaacaaaagaaaacaaaacttcatgatcataagaagttccacttaatcattaaaaaagggtcataaagaaagaggtggtaccattttcttgtagggagatcagagcctgaaacagcctcaatactgcaacctattaaagaaacggtagtctcactctgagtgctatcagcatctgacaagataagcttgtgatctttgattcgagcgaactttcgaagtggatgaatctccaataagcctctcttcctcttctgctcttttggtaacttttccttcatccagttcttcagaccttcatccaattccaaaatccataccactccctgaaaatagatacaaaacttcattacagacattgagaaagaacccaaaatg

SEQ ID NO: 29624 - DNA, 548 bp, Arabidopsis thaliana columbia
gagaatgaaaatgtttgtgggaatatgtatcgctgcaaactaactggactaactcatgtctgcgacaagaactgtaaccagcggattctctatgataaccatagctctttgtgccgagccagtgggaggattttccctctctcgtccgtcgaggagcaggcggttaaaggtgttcggaggaagcttgacgccgctgagagtcatccttctgagagctgttcgtttaagcgtcgtcgtcgtgatgctcagttccatgcttctcctttcgagaggtcttttactgctgtgagccctatctgcagcccggctggagacggaatggagttggtttagattccatgttgatctccgcaaatcctgagactgagaggcctctttatcttacgtagaataacttcccttttctctttcttttggacaactatggatatgagacattgtgctattgctctcgcagggaggtctaggcatatcctcctgccttaaagagagcttttatcttagtaatgttgaactttatgtagtacttatgtaggagagactttata

SEQ ID NO: 29625 - DNA, 314 bp, Arabidopsis thaliana columbia
accaatctcagctttctctgcaacaacctctgcttctttaccttcaccatctccatcttcttcttcttcttacctctcctcatgccatggtttacacaccattgagcactaagaccatggattctcctccgacgttcaccgtcgctacgacttctctccactcctaaaattcctctcaggattcggaccagtcgagtcagctctagattcggaatcggaatcagaagcttcaccggaatcgcatgctccggtagagttcgatctcgtccactcatacagagcagtaccagcaccatactggcactctctggtca

SEQ ID NO: 29626 - DNA, 549 bp, Arabidopsis thaliana columbia
catggacaacgcggcggatgagcaatcctagattcgacgccgccgcaaccgccgcaccaaccatcgtagacatccccggaacaccaccacactcctccgcttcttcaccactcaaacccttcttcctctcttcccccaccgtatcaccaacaatcctcacggcggctataatcgccgcctggtttggctcaaatataggagtcctcctcttaaacaaataccttctcttctactacggtttccgttacccaatcttcctcaccatgacacacatgttatcatgcgccgcctatagctccgccgtaatcaatatcgccggaatcgtgccacgtcagcacatcttatctcgccgtcagtttctaaagatcctctctttgtcagcgatcttttgtctctccgtcgtctgtggcaacacttcgctacgttatatccctgtttcttttaatcaagctattggagctacgacgccgtttttcaccgccgtgttctcttttctcattacttgtaaaacagagtccactgaagtttatttagctcttcttccggttg

SEQ ID NO: 29627 - DNA, 456 bp, Arabidopsis thaliana columbia
gaaaatacatatacagtagtactcagagattccaaagaagcgttaaacatatttcatctgtgccttgctctttgttatctatgccaatgcaatgcttatgcttattgtttatcactttgtaaattgaaagaatataaataaatagaacaaacgtttattctttctattaaaataacgttcagtgggactatctcaataagttaaaatcatatgttaaaaattttgtacttcttccatgaaaggattttgttgggaattgggatataacaaatggacagttttggtattttaattttttttttataaacaatttgttagaattataactaactagcaaaatctaaacctttttcttacccggaaaattaactaacttttatatgttcaccatatttagccttaatccgtttatccctctgaattttcccgggaaaattttacgctctctcaaagtat

SEQ ID NO: 29628 - DNA, 849 bp, Arabidopsis thaliana columbia
gcaaatcaatacgcatatcacgctaacaacctaacgcatagtatcacacaatacatattataatattttatcaattaatttctaacatttaacaatcagcacccaatgtctaaacctatacaaatgaacttcaaaagtacaaaagtagaaaggtgatactatattttcacagatcccgccctcaccttagcaactcggttggataacacaatttaggactagcaacaacagaaccggctcaataacgatctcaatctgcagcggtttagataaccgatcagagattatttttcattaataatcttgattaaaattaataaccaaatcagattctaaatcttaaattgattcggtatagctttaattaaactaattagaagtgatttactaaattatcaaccaaaactaataatttaataatgctcaacggacgacgtacgtaacaccacggtccacactttcctcccatgcacgttacttccggtttagcaacaattaaccaacactctaatagctaaaccaatgaaccaagtcatcttcttcttcctcacaacacaatttcacgtaacctctaactcaacaaaagattaattggttttaactggtttagatcatggtttaataatcaaggcaaacataacaacaacaacagatacgagacaaggttgatgagttaccttcctcaacaagctttctcgtcggcttcacgtgacgggacgaacagcgaagtggagggtttgttatcacagatctgtgatggttaaatccatgattagatttgtcaataatccaaagaaactaagagataaaaccagaattgatctcgtgcgtacctctccggtgaggatg

SEQ ID NO: 29629 - DNA, 1154 bp, Arabidopsis thaliana columbia
gtacatgtgaagtacaaaatcttcctgtccgctatggagtacttgtcattctctcctgtggatgatttacatggaaattttgaagaaatagttgacaggtatttaaatggttgagattttttttcctggcttaaaatatgtaatcttgagataccttttactttagtaatctcaaaagtgaaactttatggaacatcacagggttttgtcaagatctcgggaaatcaaacttgcaaaatatgatccctcaattgatgttgcggacgagcatcgtcagcagagtcttcaaaaagcaatagccattcagtggctctgttttacacctccatctactataaaggatgtgaaggatgttacttccaaattacttttgcgatctttgatgcacaggtacaattgatgcatactgacatatggcctcatgaatatatctgcgtctgagagaaatctcgacatattaggaaaatgtaggctaatttgttcgctgttagcctatttctcaatttcttaatagagacgaaatgaagaaatcagaggacaagagttccttttagtatgcaaaatgtttgtctcatttttttcttcacttttgcctctgtttcatggtatttttgttttttcctctcgtcagcaacatacttttcagagagtttgcattgattgccatgtggagggtgcctgcaactcctgtgggtgcacacacacttcttagttatcttgctgaacctctgaagcaactctcagaaaatccagataccctcgaggattatgtttccgagaatttgcaagagttccaagactggggacgtggcacggcaattttaactcgctattatagattggatctcgcgatacagtctgtagattgctcttcgtcttagagttggcgaaggcgattgtcgttatctcttgaagattttgggaacttatatagtcggtgacatcctcggagattctctaatatctcttccggggttttcggaaatggtatgtttgatcttttattggttaagtcttttcttgaaggttttcttacccgatccgaagttcttctgagccgggttgagctgacctcaggtcgtggctgagcgactcggaccgcgctagtcgaatgatgcacttcgagaccgggtcggggaacccttttgtggtga

SEQ ID NO: 29630 - DNA, 720 bp, Arabidopsis thaliana columbia
tcactcaaactaggtcttcgagtatatatagaaatttatttcctcgcaaaaccctcgcatagtttgctttgaaattgcgaggaagatttttaaaccaattaaaacgcaccacatattgcgagggaattgcgagaactcctaccaagtccctcgcaatttatgatttttaataatttagggtttagggtaaaatttgcgagggaagtgcgattgcgtctagcaattccctcgcaattcttcaaccaattaactcaccattttgattcagtgtttgaatcagatctgatttagattctcctatttcgaataagactctcagcaaataaaaacatgactaaatattttaaataatttaaggtttatggtaaatatttgcgagggaactgctacgacagacttgcaaatctctcgcaaagacctcgcattgttgagtcaatttgaaaaaatacaagaaaacactacttaaaattattcggattagttattctgaatcattaggaagttaaatatctacattagaatctaatttcatctcaaaaacttcaaatgtacatttttcccaaatacatcaatgatgaacttatgtgttttcaataatatgaataataagtgtttaacatcttcaatatgaaatgttgatattgaaacatatacaatatatttttgtgcacaccatataacaaattgtatgattatcagtcatttagatttcatttataa

SEQ ID NO: 29631 - DNA, 642 bp, Arabidopsis thaliana columbia
tcccaaccgaaaactcatatagacttcgctaaaccatcaagtcttttaaaagcaagaaaaagctttgttagcggttttgagtcaaatataacgagatgtcatgtgtatgattgagtataagaactagaaccgtaaccagatcccggaagctatattgggaaaaatgtcagaaaaagcaccaactttcaaatttgggtgaaaaaaccctcaactttcaatgcgtcattttaatcacaaagtttctgttgacttttacagaaaacaccaaagttttgttgaccgggacgaattaagcacatcgttaagtctccgtttaactgacgcagacggggttaatttcgctgttaacaggcatcgttagataaaacgacagcgtcttcgtaaccattaaacgttgtcgttttgtaatagaaagaaactaaaaatcccaaatcgatttcacattcccaaatcgaaaaccctaattctctctcaaccccaaactctacaattgattgaatctgatggctaggacgcgtggaggacgacagaggactcgtcagtcggcgagactggctgcgggaaaggcatttgctggaagaatcgatcccgatccatcgacagttcaaatcctagagattgttgacagctcaccatcgacga

SEQ ID NO: 29632 - DNA, 1110 bp, Arabidopsis thaliana columbia
gaataagtgtaaacgtttataagcagtcaccacaatgcctattaaatgcacaagtagaaaggaaaactaataactagcaatagacagtcgatcaacagttgaatgcatatagcaatgttaatcaaaaaacatggttttgatcaggtggagttgcttatggtggtggatatggaaatcctgaggctgggtatcctgtgaatccttatcaacccaactataccatgaatccagtaagttataaaattttgactttttatatttttttacattgcgtgtgcatagtagatgatatgtctgaacgcaccataattctctctacacagtttcacaatttgtttgaactttgaatttaaaccgaatttcagtagccaatagtacagcctaaagttcgaacaagtcaatctgatgtaaaacggaactggcttaatcgatttattagaccaatctaagtcaacaatgtgagctgatgtcgatgaaacctgtgacagaatatgtaactgaacaacatctatcttcatatatctcctattcttgtagttttaggtgcatacattcatacacatgtaaagtaatgtgctgatatgataacaatgctggttcaggcacaaacaggcgttgttggctattatcctcctccttacggaccacaggctgcgtgggctggtggctacgatccgcaacagcaacagcagcagcagccgccaccacaaggacaaggacatcgatgaaaaagtcaagattcaaagtcaaagtcgcccatttttcaagcgactctcatgaaattaaagcagcctcccttttgtatactctgatagtctctgatagattgtgaacaaagccaacatattaaagtgttgttaagtaagaaacttggaaaccacagtttttttaatttaaataagcccattaacatcttcaatggaccgaataaaggcccataagagaccacctccctcgctctttttaacaattggcgggtaaaattctaaaattttagtttcagttgatgaaccaaaaacagaagaagaagaaaattaacgaaattttaaaatcggaacaaatttcagaaatttggcgcacaaagaagtcaattggcgggtaaatatcaat

SEQ ID NO: 29633 - DNA, 522 bp, Arabidopsis thaliana columbia
gtttttacaagataaacacaagcaccaatgcacacaacaagcgactgtgggataacttgttgggcattcatcagcccatatcctgcaaacaaatagccatcatgaccccacatgttcatcaatctgattaagatatacaatcgctatcaagaagaaagccaacgtgagtgaagcagtcataagatatatgtctgtctccagcttgagtgaaaatttcatccagttgaaaagatagaaagatgtcataaatggataatggataccttaactttgaagagatcatattataggcattcggctctctgctgtttgtgttgtagctctgattgcgtaccttataatccattgacgtgggattgattatatggaggtaagaaccatatgatatttgcaatctcttaattagagaaatttctaacaaataaattttaaaagagcaatgatgaggaactaaataaatccaaattcgtcacaaaatatttgtcaccgctttattcttagagaggagaaataacttgatgt

SEQ ID NO: 29634 - DNA, 545 bp, Arabidopsis thaliana columbia
gatgactaataatcaatgtaaatttaattaatcgtcttaataattagttattacgtcagcctgttaatcaccagacacaatcataactataaataattaactatgataattgtaactaagaagagccagcgcaacatattacatctgtatgtaaaacccttaattaaggcttaatctgaatcacaacaacacaatgctttaaacgaaaacaaaaatcacaagaaccaaaatataaaaggtaattagcaatcacattttgtatatacacaaacaacacatttatttacaggtcacaacaacaaaaataaaccctcaagaaaaaaaagaagaaggaaaataattgaccctggggaagacttgaaaagtttagcccagattcagattccgaaattaaatttacgaatttcaaatcacaaaaacccaaatgaataaattacacattaaattttgtacaaaaaaccttaaagtcaaatagttgccgccatcttcgaattcgatttagccttggaagaatgtctccggcgatactctttgttattcccgac

SEQ ID NO: 29635 - DNA, 390 bp, Arabidopsis thaliana columbia
gaacaatatcttctcaaggaggtgagagtatgttctctgtgacattaattgtcatcctataaacgttgaatcttggttcagttcagtgttcatttatatttgtattctcctgtgctgcagacagaagaagctggtgaagatgatgagaaggcaataattgtggctgatgttcaacctcaaggccagcttggattcttctcacaagaagttccacaaaattcatttcggttaccgccttcgagcccctacgataaattcttgaaagcagccgggtgttaaaccggtacattctgagaatcttgcggttatatagacgcacacggagagcatgatatgtataaacacgtgtaatcttctgcttcgtatattcttagtcatctctgggcttta

SEQ ID NO: 29636 - DNA, 590 bp, Arabidopsis thaliana columbia
tccctaacagaccaattaattctcgtactcacattttgtagttagcattacaatatcataaataagatagatgagactcaaaattgttatgtttggtttataagcgattatcagaacttgcatgtgacgtcaaaaaaataaaagaagtgatataaaaaatacagagatcaatcaggtaatcttaattatgtatcattaagtggatggtcaaaatattgaatcaacttgctgattctcttgtgtcgtggaaatcaaagaaacttgatggtctcaacgtgtctctgtccaagctatggttgctgcgttgaaaaagttgcagtgggttgagagtgtgttgggcacactgaatattatatatcacatatgcaatttatggacttatatttctagggtctgcctaaactatttctatgcctcaagcaaaacaataatatttttagcctattaacaaacaaaactctatgaaacaaatccaaaaaaagataacataaattgtaaaggagaagcttcagtcaacgacaacagagattgggtcaaccctctgctcagctcagagtatcccaaacaaaatgctatgggccaagacacaa

SEQ ID NO: 29637 - DNA, 519 bp, Arabidopsis thaliana columbia
tttgttttgtgcactcgtggaaatttgttttagcttaatgtgtttttttcttgttgttattaaaatacaaagtttgtcttcctaagaaaatgaattaaaagatatttttctctccctgttttctttttttcttttttttgctaatgtgttaaagtgaaattgtttgtcagtttattgttttactatatgttagtgaatagaaatagtttttgatgtttttatacatgaaaaaataataaacattgcataaataaataaaatattttactcataatataaatgcaaaaattcaggagattgagatagaaaatgttatattcaaactgaaaaagacaagtatggaaaacaatagagaaattaatagaccaatatactatagagttgaccagttttaattcctaattaaggcaagaatattacattttaggccttttatcattttacaaaattcacctgagaaaatttgataaccctatggatatattgggccactggccagagcgagacaaaacccattag

SEQ ID NO: 29638 - DNA, 1217 bp, Arabidopsis thaliana columbia
cggttgtaaaagcttctccactagatctcgtcggctttgtacttttactcggttgatgacgtgatatagcccccaaatttaatttaattagttttgtgttggtgttttggtcggaggatgatttaggagacataccatctttgttgtgccgacctcctctccaactctttttttttttccttttccattctcctttttcttgtttaagcatagattatttaaataatgaatcttagttgattagatttttctaaagaagatgatgattttcgataattgtataacttgaagacatttgaggccagagtagtggcagacagaatcttggcacaagcaacaagtgctaattttttttttttttttttttaaatattattaatcctcatcccaaatgggcttgggccgcaacaaaaacaacatcaaatccagttacaaaattagcaaatcggaaaacatgtcggcaaagaaggaagatcgccgcttgttgatggaagctagcagagagaccggagcattagatccggcaggctcaagccctacagtttcgaggccgcaaccgatgctcgagaaactccgacgaaagagaccggttttcgtcctcgaatcaaccccaccggcgcaccaacccaccacaagactcccagaaagctagtctccccaacaagcacatcgacggcaccggattctgaagaagcaatccgatacactggacggtaacccttccttcccaaaccggtacagatccgaaatcccagagctattgcgtttcaaccggctcgatggatgcaaaattgtgacaaatctaaaggaaggtggctcaaccgaagccttcagatccgtaactcacaaccgccctctaagatcctgaggatctgcagttaaccaccaagcaaacaacactcccaccagatgccctccaacttccgccgtgggcgcagctcaagaccgacggatgagccggaggacccgaagcactcacgacgtccataaacgtgagacaaacgctgcaggttcctcttccgccagaacttgagccacaaccacatcggagggaaatcgccacaccaccgttgacggagagaacgcaaagactcactcctggaccgacgttgaacagctacgtccggagagtgaagagcaactgaacctaaagatctagatctgagaagaagaaatcgccttcaagtgagagagaaaagcgtggaatgtttcgtacc

SEQ ID NO: 29639 - DNA, 507 bp, Arabidopsis thaliana columbia
ttattttttaaataacacttattatccattctttttatttttcttcagttgaaaattgatttgtattttttatttggcatgatctgagaattataaattatttgggtaattagttcatccttaaaatatcaataatttttttgttgaatctttcttatactatcgtttaaactaaaactttatgacgagtcattgtaagtgaacaaaactttaataaaccgaaatacaaggtttcacgggtttgtatcataaataagttaggagatttggattgataaggccaattgaagcgcataagaaaatccgcgggatgggatatgatataagggttgaatcgatttgaaaaaaagaggaaatttgcaaatctaacacaaaaaaaattataattaaaaaagtagcatcaaaacaaaaaagagatcatattctctatattttgtgtattattcacaattttgtccccttcctctctttctctcctattctccctctctccttccctctctctcg

SEQ ID NO: 29640 - DNA, 685 bp, Arabidopsis thaliana columbia
aacctctggttaagataacgtgtcatttaccaatcaaatgatggtgtaaacatatttcatagatccttgatcgtcagcctcaatcaacgattataccatgctcgtcaaatgcatgattggtttgactaaaacttagatgcacaatttgcttaaattgcggaaaaacataagaagtaattttggtgtagcaattttgtttgtttgtttgttgcatgattttagtggaacaaagagcaaaatccagatttgaagcatacaagtgagtccggtcattggctaaaatatgcaaagcatagtagactttataaaacaaacatgaaagaaacagacaaaggcctcatcaaatatatttagctttaggcttccagccctggactcacacaatatacccttggatcacagagtatatgacataagcccaaatataaactaaattgctgaatcataatattacataatttttccaacacattataaataaacctcaagtttgatcaggctgagtttgattaattccttaatatataaagtacaattaagaaaaaattggagagatcgtgagacgcataacctttcccttctcggtcaacggccaatggatacccaaaaaaacgaacctcagaaattaaagagagaatatttagtaactaaaacagagaagtgaaattcaccattagtatcttcg

SEQ ID NO: 29641 - DNA, 628 bp, Arabidopsis thaliana columbia
aattgaaaagtctgtctggatacaaggttattatagttctggttgggtatagagttatattaagctgattaacaaacaaataaactatataattttacgtccttgtcctcatctggttccgctaattttagcctgttggacgtcctcgcgtcccagactgaagaagtgatgagtagggctgggaaaaaaacccgaaaccaacaacccgaatcgaaattggcccgaaaagttggatctaaaaccgaatctgaattcgaagatttattctattaggtcttaaattcttctatccgaaaaatcaaacccgaacccaaaactaaaaatacccgaatattttaattgaaaatctaaattttacctaaaacctgaaattttactcaaaaatccggatatttacccgaagttccaaaatagggcccaaaaatctatacccaaactaatccgaacccgattagatgcgaaccgaaatcgaaccgatattttagatttatccactgggttctaacttttctaccgaaaaatctgtaccgatcgggttttaacgaacccgacccgcttacccgaatgcccatccactgacgagtgtatacacagagattacactggacttgccttcgtctgagagaat

SEQ ID NO: 29642 - DNA, 427 bp, Arabidopsis thaliana columbia
tgctataatttataaaatatctgaaattgaggacaccataaaagttttttatgttacttgtaaataccaccataaaaaaatattatcacacctaacaagtatctaagtatatacaaatttgtttatttaattacaaagctgaaaataggactgggcaaaaaatccggaaccgagaacccgaaccgaaatcgatctgaaaaattagattcgaaaccgaaccccaatccaaaaatttaccttattggatcctaaattcctctacccaaaaaaccgaatccaaacccgacccgaatccaaaaatacccgaaaatctaaattttacccgaaacccgaaattttacccgaaaatccgggtatttacctgaaaaatctgggtatttatccaaaaattcgggtattggttccaatttaggcccaaaaatctata

SEQ ID NO: 29643 - DNA, 620 bp, Arabidopsis thaliana columbia
tctaaatttctattctcagagggccatcctttgaaaaatggctaaggttttaagcttactgaagcaacgcaaaaccatatgtttaccaacaaatctgctaacagttgtaacatcaacagtactgtcttgcatttatcaaactctcaagttgcaatacatagtttaaaagtggcaatatgcttccattgagactaccttcaaagataggaccatgagcattttttggttccaacatagtacatttaaggagtggcacagtatgggcatctaagactgaatcatacatgaatcgatgataataagaactctcctaatttttctgattatagaagacaaccataatcttcaacagaaaagttatcagtaaatgagaatttggttatacaacaccatgcttatgtgctctaaaatatagagacagatgttttgctaagttccttatgtctgtctactttgaatatatctatgtggatcaaaagaggactgatgctcacgacttgtaaataatgtaacataaacttacaccggacagtggtcatataacacaataaattcaagcttaaatcattaaaaagaagtccacaggtttcagtagcatgttatcactgaactgaaagtgg

SEQ ID NO: 29644 - DNA, 610 bp, Arabidopsis thaliana columbia
tatatgatgctttgtgtgtgtagtatcatcgaataacatctagaattacagatgcacttactagatcaatcaaaagagttttttgtaacgtttttcttcttctgtactgcaacacacccatttattgtctctcaaaagcttgcgggattcagcagacatgaaatcaccgcatggttttgcgttgcttttgaaatttagtcatcagctggatcttgtggagattcttcagcagtgcgtttgattgtgatgactgggcattctgcatgcttcacacaaaattcactcactgttccaacaaataccctgtccagtggtaaacaaatgtgaacttgatcaatatctgtgatttcaagctcaagcaagtacaagagctaatgacgattctcggtgcagtataaagtctaaagcataagcagtgattgatttccatgaggtgtcatcaatcatcatatgcaagaaaaaggtctcaggatttctaataaactcttgatctgtattttcccgaaaccaacaagtcatttgagactacataatgactaatcgatatggtatactgtaaacaagaataagcttcttgaggcgtgtgtgaggattgtcatacctttggaat

SEQ ID NO: 29645 - DNA, 736 bp, Arabidopsis thaliana columbia
ctgtatgagaatatcaaatatcttgtcttattattctccgacgaagagatattataaaaaaggctaccgtttggtgtgaagaaaataaaaaaggtatcggttataaaattgttgaggattatatcaattatcaagctttttgtgttcacaacttggctgatgttatacagtcacataacattaatttaatgaataatatattgaatcatataagttaggcaatttataagttgatatgagttgtagtcgattataacaatctgaattaaataattgataattatcataggtctgacctaatctttgatgacacataactagtggaatactcttattttatagtttgaaagatgattttacaatagacaatattatatgcatcagaaatatctctgattagacggttttaaaacttgtaggatgtttattatgtgcagctgtatcttaatcccaaagctaaatgagagaaatacgacatgtcatacttaatcatataaataaagtttcatagactttagatattgtagccgataatttgttttatttttattttatcttaaacattgagaagtttttttttttaaaaattttatttagaaaccccattttgaactcgcatataaataaaatctagacaatttttctgcctaaaaaaatcaataatagagatttaaggtttaatttttctgtcggatagtatcgttttgtttgataataaggtggttatatgatatta

SEQ ID NO: 29646 - DNA, 333 bp, Arabidopsis thaliana columbia
ccctgtagaggctggagaaaaaaggaggaaaatggattgtcacggaaattgaaattagttccatttagaagaaggcggtggaacgagagaacgttgattcgattatgtatagtaagtccgtgtcttagtctagaatatccatctcttgctaaactggtgcaagagactagattactacgtatatagatagagggtatgaatgatgcgtagatgtatgtatagggttatcatgtgtgtataaggatattatgtgtgtatagatgtatgtataaggaatggaagacatcatgaatgacgtgtagatgtatgtatagggttatattgtgtgtgtat

SEQ ID NO: 29647 - DNA, 536 bp, Arabidopsis thaliana columbia
gacatattatgtattaaccataaataatttagcaattatgccactctaatctaaagaatttttcatttattttagtgggaattattgattctttttagtagctacattcgcagaaccattttcttcctaactttttaaataaagaagtcaatactcgcaatgtcaaagttgcttagctaaatggactaaattgaactttattttttattgattacatcacattttggcagtttttttctaatctgtgcttttgttaaatgaacaacttcttacataggtccaataattacttcctaaatgtcatacaattgtctgcgataaaattatgagtatctagttcaacaaccaacagccataaagataatcacatttccagccaaatatctatatatagagatatcggtaaaaacccgcgcgtaaatgattcggtggtcagctgcgaagatgtactccgacagaaggatgggtcattttgaatatttggacaaagctgtgaagtggggacagtaagatacacgacaaagtaggggtagttt

SEQ ID NO: 29648 - DNA, 407 bp, Arabidopsis thaliana
ccctatgtcttctttttaatttttggctgaagtataaaactcaacccccccgtgacacacccccccccccccccctctcccccccccccagtccgccccccccccccctgtgtatcacacagctaagtagccaagacattagaaacattagtacatatctctccacgttacgtattacatacacgtctaacatatttccattttcacaatcataaaccacatgccttacctccccaattatcaatccccaaacaagcaatcgaaaaacaaacccaacttagtatgacaaaaaaaaagggtagataattcatgggtaatttatgtgttatgtataaaaaattttggatatatggtaaaactggaattgttcatcatcttttctctctctaaggaattcattaatttat

SEQ ID NO: 29649 - DNA, 574 bp, Arabidopsis thaliana columbia
gtaagcggtaaaatggttcctcaacattgtattaattaattcgacgctccatcaaaacaataacaatgtgttgtatacttgtactagataaggcccgcgttaatactcatgttagaaaataagtgtaaatttttattgataatatatgaaatctaagtataaaatttgtatatatatatatttataaatagagcttccatgattatttttttaaaattatatatgaaaaatacaataaacgattttcaactaatactttttcgattgtaaatttttaaatatctagaaaatagttcgagcatagattaaaatattttatattttaattaaatttaaatattgctatccttaaaaatgaaccatattctgggatttgtttcaaaaaatctagctaccaattattgttttccttcaaatgcattaaccctaaaatatattaactgactttctaaccctatcaatatattttgagtgatacattttgagtgtcattacttttaacagtttactaaatttatttacataaatgtagttgtaggtaaatgtatacaatttcattctaaagtgtaaatgt

SEQ ID NO: 29650 - DNA, 939 bp, Arabidopsis thaliana columbia
cccctgcaaccaaatttgaaagacaaacaagaaaagaaataaagaagggggaagaaaacttatactaataaagactaaattgcaaattgtaggagctagtcaacatccggaattattatcatgcttcaaaatgatcaaagctgttatgattctctacctatattatttactatttttagactaggcattgtccaccacaaacaaaaagatgaaagttattcttcatctcatacaagctaaggcataaaaaacacagaagaaggaatcataaatagcaaacgatttcgtgggtaatttctggagttgctacaatgatgagttttgttttgatgcatacaagtggtccatatcaaaatcaccacgccccttcattactgcaagatggtaccatatgtgaatctctaactagagtagcactcccatgcataatgcgtctctatctatgatatgtaaatattcaaatctttaagcattatacttacattgtcaaccacaaaaacattatcagcaattcctagtttcacagattaggcatgaaatttgaagattaaaagagaatcacctaaaggaatctagtttttcagttgccaagcattagaaaaaagtggtgaggactccagaaattgtagttacgataagctatgttatcggggaaggagctagttgatgtgatcctttggatttaggctcagctagacgtttagataatagcttggcatcgagtggttcagacgcaacattatctttcgtcttcttccttttgaccaacattagacaccgtttgaaacaatgaaaaaggcggggtactttgaagtccaaacagtctaaaatgagtgtcgtcttacaaactaaaacgacaggctgtgttgatacgtgggcctcttgggctttgaataaagttatgggcttatatgaacctgtatttctattttgaaagaa

SEQ ID NO: 29651 - DNA, 739 bp, Arabidopsis thaliana columbia
atctttcactttatagagtcagcttttagagtctttgagatgtatatattttcaaagttaattaggtcggtgaaccttatctctcactcttagcagaaaaaaggcagtgtttcacaaggaaacttactaacacatacaactcttaatattactttagacactgctattcattctaaatgtcacaagatcttttgatagtcactaattctaaaatttacaaactgttcacggtaccatgatctcgcatgtggcatgttgctatctagcttgtctatattcgggtttgtagtaggtagctctatcctcttttcttttttttctttttttttggatttaaggaatgaaaacaagtatgtttgcacaaaataaaaataaataaataaataattgaaatccaaagcacatatatgtatattagaaacggtccatgtgtatacgagggtaattatgtagttaatacctgataaagatgtacaagtattcattgatattgaaattcaaaatgataatataaaaaaaaaactcttattattcttctctttattgataaaattacttcactgtttaagatcaaacttattagggcaagtacaagacaaacatttccatgtgaatcggaccacaaatcccttaagtgacgcccttttactcgtcctcatatctttcttcgccaacttcttcctccctgctcctccgccaccgtcttcgttctcctcttttcttgagaacgtatagctcc

SEQ ID NO: 29652 - DNA, 568 bp, Arabidopsis thaliana columbia
taaaagggcgtattccaagctaactcagtattttaatcattcaaccaagcatgtgaggtcctagaagtagaaaactaaacaatccagcagctaaaagcaaaagggtattcctccatgttgagcaagaagaggcaaaatttgtttctcatgtaagttcaagaagaagcttagacttcataccttgaagaactcatagacatggtattctgagactgaatggttcgacaaatagcggtccgcaatgaatctgttaagggccgagacaaagtttccaagaactgcgtacataaaaagaccaaatgatgaagcatgcttaaattaatggctcaatgaagagacagaatatatgatctcaatataagaaagaaaaggaatagagggtatcggcaaaacaaagcaacttaaacatttgcatcagccatctaaccaagacaatactgagactagagttggaaacagaatccaaactattcaacacacatcatatgaaaaggaatcgtttttaaagaaacagttcaacatagttcctggtctaaaactagcaaattcaattgtatagttacgcaga

SEQ ID NO: 29653 - DNA, 191 bp, Arabidopsis thaliana columbia
acatacaatatgaaaacgattactcgatggtgctaggacgtatagctaacaatctataagattttgatagattagttgtttatcttacagattgttttacagcaataattctataacagtctttatatctttatgatatcctataaaaatcaagttcatcaatgtaatcattattagataagtgctgatag

SEQ ID NO: 29654 - DNA, 588 bp, Arabidopsis thaliana columbia
gtataaacacatggcccggcccattttaccccccaagtgctcggcccaaattgaaagtgggactcactggattgccaactaattttatttaacacgacgtgaagtttggaactaatacgtcaggtattaaaagtacataaacatcatcattactcaatttgctaatggacgaatagagacggaatcaacaaagtaacaaacgacttcaatattttttttatatgttactatgattcgacaaaggattttttttttgttatgaactgaagattattggatttttaatcacaagatgtcaatatcaaaattcaataccatgtctcgattagggatatcaatatcatgatattttaacaactttaactatgtaatttaattcgattatagtttttgttttaaccttcgtttgatttgtagatggtagaggtatttagttgttgaactcttctttatacacatgttgtttgttttgcttcttaaaaggataataatttttaaacttattacatgtgcaccactggtcgcattcgtagtttccatattttatgcgcagaaatgaggatacttgggaagatcaaattattggga

SEQ ID NO: 29655 - DNA, 529 bp, Arabidopsis thaliana columbia
gaatgagagtaaacaacggctatacatttggttgattttacagctatatatatatgatgaaatgccagtaatattgccctgtggcacatgaacaataatagcactaacaaagtaagaatccaaaacttatcaaataattgaaattaatattattcgatctgttcaaaagcatccatcgtaaaacacataacgcccaccataccccacattcgacatgctatcacccaaatcactccatcactcgctctcctttactcatttcataaggaacaacaaacttttttttttgttttgttttttcctaaatcgttgttttcaaataaggaaaaagctttgtaactttgtttgtaaggcaatcttagcttatcttttacacattcttactccaaattttctttctttttattcaacaactttgataaacctttctccctccctctattgactttgaaggtttgttatgttttttccatagttgtgtatttagtgggaaattatgatgaaacagacaattgtagtggtccaatag

SEQ ID NO: 29656 - DNA, 462 bp, Arabidopsis thaliana columbia
gaattttacactactgctttcagaaaatgatagacttttttttttttaattcggtaagatatcaaaaacatatctttcataaagatctaatagagtaaaatagtttcagttccatctaaattgaaagaaatatcaattcaccgagaaagcaagagttaacttccaccaaatatataaatgattgtttttttgtggtaaaacaaaaaaaaaaactaaaaataaccatattttacacattttatacttttttaaaaagactttaaataattttgatgattttagagaagttcatatgatttttgtaaaatctattcaaatcatctcaaatcctctcaaattctccagaatcattaaaacttaaatctacaaatcgtgttcaataacttgtggattttaagatggattttgatatcattagttcaataacactgaatttcatgagattttttaaaatccatgttt

SEQ ID NO: 29657 - DNA, 555 bp, Arabidopsis thaliana columbia
gcaattatttattcactactgatcccgagtgaaaggcaaattctggctattcgggtttcgtattcagcttagttgtcgaggttgacatggtgtagttttaacttcaatcttttacatgaaagactacacctaaactacaagtgcacaataaatcagtaatcgtatttgaagatagatcccattgagagtgtagctatagaagatcaggcgaagacaaaactaaacttaggggttttggttctcggtttcctaataactaatgcaatgaaagcaaatgaaagcaatgaatgaaagcaagtaaatgaatgaaagcaatgtaagaatcggttaatagtggttgtaagtatgcgatttaaggctttcggcattctaggatttctactggtatcttggttctcgataaatagggatgtaaccagaccttatgtccacgggcctggtccgtttagtaacatagtggggtgggtacaggcctatgtagtgaagtcaaaaaatagcgggcgtagcaggtatgatccgtttggattgcggattaacaagacatgccattaaatg

SEQ ID NO: 29658 - DNA, 470 bp, Arabidopsis thaliana columbia
gacttatctaaggcccactaaaacctaaccttctgcgtctggctcaacggtaactgtagctttctcatcaccatcacagacactctctctctttctctctatttagctccagcaacacaacaagtggcgatgcaaaacgagtttgggacttgggagagaagaagagcaaaaaccttgacgttagttcccttgaatgaattctagggttttgtgttatttgttggactaacatatccaacttctggcccatttataaaacttctggcccattaatctgataattgacgccagataaagtattatttatcttcattaaaaaaatgggaaaaaaattagacgtctctgcagcgacaagcttcaagtcttttgtgatcttcctatttctgacgctaattcgaatccttcactcttcaaattgattctttcacggatcgaacaaattatctgagagtaccgattggtaagatctg

SEQ ID NO: 29659 - DNA, 537 bp, Arabidopsis thaliana columbia
gtgtcaattatttggattagtatacttgaatcattgttgattagtattaacaaatataatttcatatttaaggcttgccaaacagggtttcgggttataatacttaataaatttagtacattatgtgatattgttaaatcttttgaactacatctaatattatgaacccttttgaactcttgcatttcccattaacttactagaagcagttaaaatcttttttgtttgtttgatgtgagttgagtcttttggttatgtgggtgattcttgagcttatagagtatagaaaggtgataaagcttgagtggtttcagtttgtggcttaagtgagtggctcatcttgagctattatcagaaattactcatatctcataactcatccaattgggtaactcatcccatacgggtaattcttaatgccaatttctgaagctttagataattatgtgttagctttcagtattgttatgatgaatttatgcagaaatcgagtggcattagtttcttgattgcctatatatggcgctgtaaaagtta

SEQ ID NO: 29660 - DNA, 303 bp, Arabidopsis thaliana
gtagcaccaaatctccatcaccctcacctagtccccattcgaagcatcaccatcaccatcatcatcaccatcacgatcaccacaatctacatcaccaccatcatcaccagcattaccacaatcttagcccgaaaatggctcccgagctttcacctgtggcctctcatgcttctcacagaagctgtaggagagctccgtctgcacctccaggctgcaaccacagggcatagcgtactatttcaagcagaaacgcgtgcagttttgatgcacacctgcgcgtgcttcttgtgcctcgagctcaga

SEQ ID NO: 29661 - DNA, 495 bp, Arabidopsis thaliana columbia
taaacggctgctctaggttttttgaactaaaagccttaatatgggctgggttttatctttaaagttgaaaagacaaaaagaacaaaaataaatccgacctgccggaatcgaaccagcgacctaaagattatctgcaacgcctacagtcttccgctctaccaactgagctaaggtcggttacattaatcctcaagacaaaactataaatatcctaatatttttgaggctgtgagttatgaaaatttatgattaacttaacaagacctatatataatagtctaccatatatataacaattatagcattgaataataaaatagtcaagattatgggtttaatcattcttaattagttaaattcaaatgaacaagaaactactggggatttgcctaactactgtggcgcacaataattaacgtcgttgtttgtcgttgtaccttaattgcgagatcacacagagaccatcccaattcacattattttcagatatatgtt

SEQ ID NO: 29662 - DNA, 600 bp, Arabidopsis thaliana
cttttgccttttgagatgtttgatatagtggctaaatgttttgggatacgacatgtctcgtacaaatggcctttcatgccacatctgtaacaagtactttcatctggtttctttgaaacacgaccgacatcattcacttgaaaatttatgttggttttcttggcattcaaattattgggagggagaccccttccttttcttcgtccacgaccacggcctcgaccacattcgcgtcctcgtctttgccaattattgtaacaggatgaagcaacattcacttctgaaagcggacgtgatccagttggacgagttagatgattcctcatcatgagttcattattttgttcagcaacaagaacttgcatcaagttagaatatcgattatatcctctcactcgatattgttgctataggattacatttgtaggatgaaatgttttgaaatttttctcgatcatatcataatcggaaacattttctccacatagaattatcctggaagtgaaccgaacaaagcgaaattatattcacttacacttttttaacctgaaaccgaagatttagcattcatgtttgaattttggtaagatacatattttt

SEQ ID NO: 29663 - DNA, 491 bp, Arabidopsis thaliana columbia
tgacatgtctggtaccaatgtcctttcatgtcacatctgtaacaagtactttcatcttatttctttgaaacacgactaaaatcattcacttgaagatttttgttggttttcttggcattgaattttttgggagggaaaccccttccttttccacgtccacaacctcctccacgaccgtgaccacttcttgaccgcgtccgcatcctcgtccttgtccttgccaattattatagctggatgaagcaaccagagttgtgccaatgtgagaggaaaagaaacattggcctagggcgtctgattttggaaaaaaattaaggggcataaatttattaatgctatatagtttatatgtagttaaattattatataaatgttactgttatattaatttaacccaacttccctctctcccttggcgactacagaggcgaccaacaaaaccagttttctgtttcatttttttacaggctgccggcatttgcggtagtttt

SEQ ID NO: 29664 - DNA, 1019 bp, Arabidopsis thaliana columbia
atgtatccaccataccatggatccgacctaatctcccatgtcgaatcaaattcaaacgcttcccatgggacactcttgagatcttccaccgaaacccctaaatcctcaagcgtcacgtgttcatacccttattcttagtattactctcaccaacagtactctcgtctttatccttctccggtagtgatctcttatcctcgttaatcttcttgttctccatcgtctcgtgaagatcagtagaagaaaaatatgaatccgcttttgatgcaacaccattgtcctcctttgccttcggcggtgatcccttgaccacgcaacataattcgtccacggcttcgacgttgtcccaccaagaccctaatctcggcttcttcctcttcggctctagggttacctccttctcctcatcgtcatcgatgatgatgatttcatcagtagatggttgtgatgcccaggagtttaatgtcagagaatcgaccaagtagggtttgtcatcgtgggtcttgttatgacgacgtttctcggagattaagttgaatccgatcgacgactcgttaatctcttgtttctctatcgccatgtttcgttttgtatcgaattgagaatcgagagactatgaagtttcttaactcttaatctggcttttgacacttaaagcgtatgcggtctttagtttatatatatagagacaagagtgataagtctcgtaaaaggaatagaaaacctaaaaaaatggaaattggtttctcagataaggaaaaaaaaaaaagaaacttcttttataaccctacataatctcctcaaagatatagcagttgtttgtgtaaatagataaatacgtagtttaacattaaaccaaaaaaaaaaaaaagataaatacgttaacttctttttaaataatttttgagactaaattataacctaaattattaaatctttcatataatcataactctatttctttggaccaaatcggtagatatcctaaaagaataggtaaaccctaattttcatgtgat

SEQ ID NO: 29665 - DNA, 645 bp, Arabidopsis thaliana columbia
tcgactctccccaataattttaaactactatagagaattttggtaactaagatcagaaaaatgtaaagtatatgacatacattcatgaaaattagtgagtgaaataaggatgatacaaaatacagcaattttggatgacgacattgtaatttttctctttgaaaaaacgttttcttgttttatggtaacaaaaccttacatgtaaagtaaacatatatgtaaatgtctccaactatttttgtagggaaatcctagaaaaactgtttttaaaaaaaattagtttggctagctttatttcctttatattctaaaaattgatgtttaagcgttaattactcatttgaacaaaaaataaaagagagtaaattacttgtttttgaggatttccaaatgatcaatatttaaaacttatactaacaatttttttcttttagttattgatttagatttacggtcgttatatttagttatgtaaatactattattgagttataagaagaggaacatgttcaaaatccaagcttcattcgagaaaaagacagatgcaataagtaagattgctctctcgtaagattttatacaagaccttacacaaatacatatcgcatacataagagtgtttagatgctaagtgaattagaaata

SEQ ID NO: 29666 - DNA, 1029 bp, Arabidopsis thaliana columbia
tttagcatgctcttaatctattataaaatcatgtattttatgtttaaaaaaaatataattgatattttatgctattgaaacaaatttttttgtagggatgatggtgaatgaaattgaagggcaacaacaacaacaacgttgtgaggaggctttaaccgaaatagattgtggtgctggcaattgtaatgctctatgcctacagaaacggaagggattgggccgatgcgtccaaagaacaccttgcgataaattaaaatgcatgtgttattatccttgtagttcttgaatttaaaattttcttttcctatctattaattatcattaactaattaataaaatagatatttatttgcaatccattctgatatgaaatgtgatgagtcgatctcaattatctcaaactagtccagaaacaaatctttgtattgatttttattttctctcttctcatgaaatcacatcatcattcatactcctagagaggatatctagtatcattgtcaagattagataactttggagtttcatccaatatatgaatatgataggcaaaaatgacaatctctaatgagatttattttgaagaaaaataataatagtgaatatggttctcgtttttgaaagcgtaaatcttttctatatttatttattatatgtgttgtgtattgatgatattaattagtgtaatttgggtgtatcaacttttttttatcatacttcaaatgaatgaatgaatcaaattaccatatatatatatatatataaaaacgtcaatgaattatatatataaatatatagaaaaaaatccatgtgttttcaaaatagattaataccgtcattggtttctcaacttttcaaagaaaatttaaatctaatactgatataaggtcatgtattttaagattctattaaaaaaatttgggtacaagatttcaagagtcattaaaaatgataaatctgagaaaaaaaaatgatagatctgtacttaacaaaaaaataatcaatatcattaagtgaatgaagtgaatg

SEQ ID NO: 29667 - DNA, 527 bp, Arabidopsis thaliana
cttgatgttatagaggatcttttcttaaccgatttgtaatcgtttttcaccttgcatactctttgttcttgactctccaaccattaagccaacttcagtatctcactatggcttttcatatttttgattcaggaatgtagaaaacaacttattctcgggacctataccgccaaatctattgaaaattccaaacttcaagtaagtattactaaaagaaaacttgaatgtttttgctttccttttctttagccattcatgttacattgtcattataaccgcagaaaagatggaactccgttcaatacatcgattataacacctacgcctccgcctgtagttgaatctcctcccgctactcaccgtgctcctcctgtatcccgtagccctcctgtatctggtgttccccagcacctattgctccttgcgctccactgcaaccaccacaacaatcggcacgcatcacgactctggtgtggtcaccacttcttctgataatggaggaggagatcctggaactctgtgtcagg

SEQ ID NO: 29668 - DNA, 479 bp, Arabidopsis thaliana columbia
cattgtcctttctatccgatttgtctgaactgtaagtctttattaatgtagataccgtttcttgcatctgcggtttttcctctgtttgaagcagactctttcttttcccttcaggtcattgggaagcaatcttctatcaggagagataccagattactttcagcagctatcaaaactgacaaaactgtatatttcctcctcactaagtctcattttgtatcctcccatcagcgtctttcatttatacattaagtttctaatgcagggacttatcgtctaacatactggaggggcatttaccttcttccatgggagacttagcttctcttaagatattgtaagtgcacatatatgaaaccgtatacaaacattgttatcattgcttttatatgtgatgtggtcggactgtaggtatttgcaggacaacaagctcacaggaacacttgatgttatagaggatcttttcttaaccgatttgt

SEQ ID NO: 29669 - DNA, 729 bp, Arabidopsis thaliana columbia
caaatctcatccagtcatccttcgtgttatgctttctatatcatcttcaccttgtaccttacgtaatcaggcgttgtgaaataggaaaacgtggctttcaattcatatatttatacacacacaatttctctaaatatgtaacttaaaaatcgaaaatctagtagaaataaaccattgtttgcatgtatagatgggcgtgattgtcgttaattgtatgcataaaatgttttagaacttgaataatttatcaagtctgaacatcttcatctatactaggaatgcctaaagcagtaaacgcaataaaaaggaacttcaaatcatcttttaattttgtaaagatgtatcctaatctcccatttgatttcgtttagtaaccgatgctcacattaatttattttgtggtttaaaagtggtatacgttacgtccacaacatctgctcagtccgtggccaattgcaggcatgggcacagttcgttgaagccactagccaatcttagcaaatagaactataaattaagatccaatttattttatttctccctttgaagacaacaaatatatcctaatccgctttggctggccttgaatagtgttgagtgcatgcaacttaatttacatagaatatttaataaaataaatagtatatccatcgctctttcgtttgtttcctaagagaatcattataagtagaataatattaaattatgaataaacgaaaaaaagaaaga

SEQ ID NO: 29670 - DNA, 595 bp, Arabidopsis thaliana columbia
agaggatcgggtaccgagctgtaagcctttcctcgtttgattcgtcgaaacagaagtacggccagccctttttatgaagcttcccagagtttcatcaaactgtctgatccatttcaccatggaatgtctagtaggtgaattctactactttagtttggcagtgtattttttgttaatttcattggctttcgccgtactaagatcatttctatatacattataatgggttcgttgcctaatgactccaaaatgcttcggggtcttggtttcgttcaactggataaactctagtattctagttgaatataaagtaaaaacttgcatttccagtctagtatatgtaatgattgaaaatcaagaatttattagcttatagctttgccaaaaataccacatatacaatacgaaggaatcaaagagtaagtaaattaagatcaaattcagtagtcgaattcaataggattcaatgaacagaatcaccaaaaattgaatcaaaatcacaattcccttatacacatgtctatactttagaatacatgtaagaaaaaatatctatgtacctcgttgtgaacctaaattagcagttgtggaagag

SEQ ID NO: 29671 - DNA, 587 bp, Arabidopsis thaliana columbia
cctgattttttttcacaaattcaaaatgtatctattatacatagttgatgatggaacttgtgcggatttttcaattttttgtttcttttgaccgagatttcaaattacgagttaacgttaaactgagaagtcgcatggattacacattgtttaactagctacacatgattagaacaagttaaaaatactaaacatattgtttttttcgccaaaaacaagaaagttaaaccgttttgacgagtgttgttataacttcgaccgtttcgatgagtgttgttatagattctgccgtttcgttctttccataattctcttttaacttcttctctgttattacaaacgttaacaaaacttaataaactagaattaacctgtttattcaaatagacttatttttttcataccttacaattatacaaattgttcaatatatatttaatcttatgttttatgaaaattcaaattataaagcttacaatagtggtggattatagttaaatgtttttttttgtttttaaatccataaattaagatacatacaaaattagtatagtataaaaaggaaatataaaaatacacatccatgc

SEQ ID NO: 29672 - DNA, 996 bp, Arabidopsis thaliana columbia
tgaagagcaatgtagttcttgccaaggaaagtctggataaatctctgtgcagtgagtaaaataagccggtttggttcaatcaaagttctgcacttgtgagcaacaggaccaccaggctgcatcacccactctctctcaacattagcatagaacacatccccaatcgcaataacatcgtcatctgatctaaaattagcctccacttcctcagctgtcttgttgcttggcctcgcaatatcttcttcccatggtgtgtctagcttccctccaacagtgatccccaaagctttcaactttgtaatatgctctttatctacataacacggttccggtttcgagaagtaacatatgaatctattaatatgaacatgatgatgcttcttcctattcttatccttcttccaaaactcctcaaaagaaaccacaacagtccttcccaaacaagtattgattcgatcaatatcgatgattctactgtaatgataatcaaatctatgactagggatcacaagaacacgtttcagcaatgctgcaaagaacatatgcttctccaagcaaatcaagtggttactcatttgaccagacaaacaaatggcgaatagaaacttatccggcctcggcttccattgaatcgtcttcctcccattcaacttctgatccactttccggcaacttccgccggcgaagtaaccatctgatgatccaccgatatcaacatttccagttttatgcggcgatagtaatgcattttggatctgtctattcaacgaaatctgccggaaaactgcagatttcacgtcgtcgatcgttgataaatttgatacagtgtggttccagatagagaagagatcgctctcttgcttcctgagaagatacagtgcttgaagatccgattcatgaacccgaccccgttaatgtatttgaccggaacgcagaattaggaactttgacggagaagtaattgctgaaatcggtagataagtagatgaggatgat

SEQ ID NO: 29673 - DNA, 719 bp, Arabidopsis thaliana columbia
ttgaagtttgctctgtaggttagaacagtatccgcagcgaatctttcatttgtcgaggatacaggtcagttgcagatgcaatgttttcatcattggtatgaaagattgaaatctatttgtttggaaatgctttaaaaatcgtaacggtgttcactttgtagctcgccattttacgtgcaattaggattgcagcaaggttaggattcagcttgactaaagacgttgctatttctgtgaaggagctttcttcttcattactgagacttgaccctgtatatctcgttaccttttcttgttctccttgctcttcttttttgtttgtaaggttaggactaaacatttttctatcgtgttccaataattctgcagtcaaggattcggatggaaatcaattatatgctggcatatgggtccgcagaagcttctttacggttattatggagatttggcctcatggaaattcttctacctatccaggtatggtgaattttctttagcagtgtggcattatggtgtacacactgagtactttctgttgttcacattgaaatcacttatgtattcgcaggcatcttatcttgttcccaagggttccggagcgtgatggaaggtccacatgcttgtggtacatatttttgcattctcagttagacatggcaacttcctgtctagtagtagtaacactacagagtgaaattatggtccatagggctactgat

SEQ ID NO: 29674 - DNA, 582 bp, Arabidopsis thaliana columbia
tgtcttagatttcggtttcggtttcggttaggttagtaaccgataaccaaaggataaccaaagcatatatgtatgatagataatatatcacatatattgtatgtattgacacttaactatgttcttctctttattagtttgcaagttaaatttcgtgagttgtgaatcaggtgttttaatgttatggagagtatggaccatatttgcatctttgtgagttgtgaatatgtcttacgttctatatcggttattggtcaattttttttgttgtttcgatttttagtcggttatttcggttttggtttatttatggttaccaagtttaatatccgaaccgaaccgaaccgaaagatatccgaaccgaaccgaaccaaaattcctcaaatatccaaatggttcttatattactataaccgaaataaccgaaaccatgcgcaaccgaaccgaaaccgaatgcccaggcctacaacatcgaaaaggataattacaaaatttcaaaaaaaaaagttgttttctttgacaataggttaaactacaaagtcttttccttaaagtacttactccggctagtatatgaacata

SEQ ID NO: 29675 - DNA, 627 bp, Arabidopsis thaliana columbia
ttatttgcttagattttaaatttatataatgatagaaaatctaaacggattttgtatccagcattagtcgttagtgattccaaacattcaatttaggcctgggcaaaaaaactgctaaccgattaaccgaaccgaaccgaaaaacatggttcggttcgggtttggatagcttaaaataaccggctggatattatatgtcttagatttcggtttcggtttcggttaggttagtaaccgataaccaaaggataaccaaagcatatatgtatgatagataatatatcacatatattgtatgtattgacacttaactatgttcttctctttattagtttgcaagttgaattttgtgagttgtgaatcaggtgttttaatattatggagagtatggaccatatttgcatctttctgagttgtgaatatgtcttttttttacgtacgttctatatcggttattggtcaatttttttggttgtgtcggtttttagtcggttatttcggttttggtttatttatggttacaagtttaatatccgaaccgttcctcaaatatccaaatggttcttatattactataagtgaaataccgaaatcatgcgcatccgaccgaaactgaatggttaccga

SEQ ID NO: 29676 - DNA, 892 bp, Arabidopsis thaliana columbia
tttttctgagatctttctctgagaagttgtgatgatgagtaagtagaagaagagagatctggagaagttggttttaggagtgaaagagaagaagagagaattaatgaatattattacgatcgctagatttgcggctacgaaaagtgtacgactaatgagattgtgacacgtaggaaacgtatggaaatagagaaaggtgcgaaacacttgatcttgccaggttggtttttttaaatttgaaaatatggagaaagaggattttcgcgtagtaaaaaatgtgaaccgtagcgtgaaaccggcacgtgcggttcacgtgaagagctgaccttcacggtatctttattcaccggcactcgcaatggtttgggctaggcctgggcaaaaaaaccgctaaccgattaaccgaaccgaaccgaaccgaaaaacatggttcggttcgggtttggatagcttaaaataaccggctggatattatatgtcttagatttcggtttcggtttcggttacgttagtaaccgataaccaaaggataaccaaagcatatatgtatgatagataatatatcatatatattgtatgtattgacacttaactatgttcttctctttattagtttgcaagttgaatttcgtgagttgtgaatggaccatatttgcatctttgtgagttgtgaatatgtcttttttacgtacgttctatatcggttattggtcaaattttttggttgtttcggtttttagtcggttatttcggttttggtttatttatggttaccaagtttaatatccgaaccgaaccgaaccaaaattcctcaaatatccaaatggttcttgtattactataaccgaaataatcgaaaccatgcgcaaccgaaccgaaaccgaatggttaa

SEQ ID NO: 29677 - DNA, 510 bp, Arabidopsis thaliana columbia
cttacacgaaatcaacccatctatcaagctagctgtaattagattgggggcctcaaatatttagtaaaatggtggtggtgcatcagatgtgtcacagcctgtgagagagaagtacaaaaggaatcaatgtttaaattggtagtgtgccacaacaatctcacatacaggtcctcttttattggtcacttgctgctgctcaaaatgttttcacctgcttccactagcgtctatcatcacttcatcgcaagatttctggttaagaaaatgctcagagacccaattcactgacaaatgtagatcttttaatattgagttcctgataacatgctcaaattgggtttacgaaactgtaagaaccagaaagccatgccatattgccatcccataccgtgtggtagagagcttaaatggagcaataagataattgggctattgatataattaagtgggcttttgccatttatcactgctacccagtacccaactacccatgtacgcttttcttataag

SEQ ID NO: 29678 - DNA, 847 bp, Arabidopsis thaliana columbia
ggatcccatgaattctagaactaatttttgtaaatcactagtttttgggtgcttctgtttggatgttgcggaactagtctgagggaggaggttcaccggagtctccttccactctttgaaggtcactgaagcatagtcgctgaggagggttgagatcgataagattttaaaggattgcaacaacggagaaaaaaactgaaaaaaacttaggtaataggataagaaaaggttgagaacagaagtagagcaagctcttggtggtgggatccaacgcgggcgaccaagagccccgccaccggcgtcgaaaaacttgaaagacagaaactcctcgatagtcgtgcatgggagagtttgtttcacgctttttagtcaactagaagtatactactcaaatctgattttttgacccgtattacatagtagatagaatgttttttttcaaaacaaaactagtaatattttacaaaaggcaaggttaccttttattatgtacttcctaaataatagtatatgatgcaatttggtgatgcaattagttagttgttaattgagcatccatgtgggatgcaacttcaactatgaattttggcattgtctttctcacatgtagacatggtaatgtaactatgtaagttctcgttcattggtatgataaatagactttgtttggacagttatagttccttgaaccagtcctgacctaatatatttttgggctaagaagttttaaattactcgaacaagttttaaattgcataacccaaaaatcagaatataaactcagattttgtagatattttgggtatttttgagtaatctgcatagatttaaatacacatttttgata

SEQ ID NO: 29679 - DNA, 675 bp, Arabidopsis thaliana columbia
caaccctatttaagtttccttattattttgatcacttaaaatattattaaattatttataatttgataactattttgtccgtattttattaccattcaaacattctcccgcaacacttattttttaataaccgcacttgttatgcattatgtatttttctccaatttaccgcacttaaaccgcatcgcactactcaatccgcttgtcctgcaccgctcgatccgctgtcaccattcggtgcctacagcggattgaacggtgaagaacataaagcggtgaagaatataaagcggtacggtttagatgtggttagtgggagagaaaattattatgcggatcaagtgtgtttagtacggaacaaacaatgcttgaatgatgactattacaagtgcggtataataataataagttattaaattttaatttaaaaaaaataatttttaggtaaaagaaacaaattactttttgaacaagattatgttatttgataagattaatacatgaaataaatttcataattttctaaacttaaaaatatatttcgcggatatattatatatgtatatacacatatatacatacaaaactgaaaccacacctaaaccacatcataattggggtaaatcaaagcatgtgcggtttagatattcaattgaaaataagaagatgtcaagt

SEQ ID NO: 29680 - DNA, 487 bp, Arabidopsis thaliana columbia
cacatctaggatattgaatggtaacagctagtttgatagagttagagattgatatagatatagtggattcaggagagttgggtttatcgggagttttgcggttatggtgggtatgagagagtggcgataagaatgagaatgagaatgtgagaagatttccattcttcttcattgagactcaacttacaaatagaactgtgataaagaaacactcagatcctaaaccaaaaccaaccaacaccaggcttgctcaattagtttaaagcttgccccaaaagaacttgttaaccgactgttagttaggttaatgtggtattaaccaacgggtgaactatgcttttgtctttatttttgagatttatcataactgtacattctttttgttggttctgttgtgttctggttcttacttttatcaatatatcccatgatttggactgtcataattgtttggtaacccttatatgcgaggtgtcaaatgtaactg

SEQ ID NO: 29681 - DNA, 272 bp, Arabidopsis thaliana columbia
taataccaactttgaggcatactatataattgaagcaagtataaacttaactaaactacatatacttgtagacttctctgtgacacatgaactcacaaaatgcactgaacacacatactgagagctacaaatgtttttatttctgaaatccaatgcaacgcattacacgaatctacaaggcttaaaagagcctttgttccatctaactacttattccatagtgcaaatcgttcaatgttgactagcaaatgggcatacttcgataaccaggt

SEQ ID NO: 29682 - DNA, 494 bp, Arabidopsis thaliana columbia
agaggatccctgtttagttaagtttatacttgcttcaattatatagtatgcctcaaagtttgtattgaatccttttgttttggttcagcgtctctgtagatttggttctttctacttttatgctctggaatatttgacacatgtcttgatctggtttgagtatctgtatgcagggttcagaatggaaggagaaaacagaaaagctggaaacagagttacagcaatgttacaaagctcaatctcgactatctgaacaactggtgatagaagtagctgaatccagaacttcaaaggctattttacaagagaaggagttgttaattaatgacttgcagaaggaattaacacaaagaaggtaagaacggttttacagtgactgtaaggaattatgttgtgcgatatttaaaactagagttgttctgtagggaggattgtacacgattacaagaagagttagaggaaaagaccaagacggtggatgtacttattgctga

SEQ ID NO: 29683 - DNA, 492 bp, Arabidopsis thaliana columbia
gacctgttagccaagccggcacttgggcttcttgaaactctggggctgcctaaggagactgcggtcccggaagttgaagagccgccgactggaacccaggactccaatactttgcagtctccatcaccgcatatcctcgagctagaaaacattgtacatcaacttggacggtcagaatgcccagtcaaatttgcgtacgctccaagatttggagcagagtatcgcagctctgaagacaattagggatacagaccagctccatcgagccaatccactaatggaaaaaggaacacttgatcaggatattataatatcgcgcaataagatcaaagactactatgactgcatcagcaattctctgtctgcttctgatgaaacgttcaagtggctatctataggcaacctatggccgaccctgactccaactacaattctacaacagctacgttcgacatcccgtcatgagtttggacctgacatgaaagaattatt

SEQ ID NO: 29684 - DNA, 593 bp, Arabidopsis thaliana columbia
tgtgcaggaaggcattgtccatctgctaagtacaattgtactcttgtttcctgctgccttccacagtaattatgacaaggtcagctctcttcgcttctaatttcctgaacttattagcattagtattttgatagctacttgacaacagttcatagtctaatgaatacacgcacatgtgcctaggtggtaacataaatatttgaaaaatgtctggtgactatgatagtgtactttgagtttatttgaaatgctattccttgcagattgaagccgctattgcctccaaaatattttcggcgaaaaccagttctaatatgttaaaggtattcatctttttatatattctctattaactaagcaagaaaatattaacgtgcacttctttctttttatatcaaccttcagaaatttgcccactttctagcattgctccccaaagctaaaggtgacgagggcacctggtccttgatgatgcaaaagctgctgatatctataaacgtacatttaaataattttttccaaggtctagaagaaggtaatttgttaatttctttgttcttttcgtttgttttcggctatagagtgtccctgag

SEQ ID NO: 29685 - DNA, 577 bp, Arabidopsis thaliana columbia
tccttttccaaggtacaaatcattgcagcctccggtactgattcttccaaagcatatttgttttctacacttgtcggacactctgcaatggtagttacaggcataatctccattggcatagacttcggactttgttgcaaagctggtccaggcacatgattcgtatatacatcccctatgattgaaaatttaatttccccaggagacataccgatgcgatcgtcattaggttgtttctccaaattcgacgatttagtttgaggaaatttaggggaaccaaaaggagaatatagcttcacgggagaatgaaatccaccagctgatgtaaggtcattttgtttctcttgatgcaccactggatttataacgaatggccctggtggattcataacaaatgtccccattggcttgtcctcctctgctaagagggaagtcttggagtcagccacttctttatcaaatagacgcattgatgtttgtttcttaagacttctcgcaggcggcatttcgtgtttatgggcggtaatacactgttgatttccgatagttgcttctgtgatcaaggaaggcaatggaa

SEQ ID NO: 29686 - DNA, 549 bp, Arabidopsis thaliana columbia
ggtcatttcttttattttggttcttgatagttgctttgatgattagggtttttggtatttaactcgtgttgagatcgagtttcagattttttcttcactcatcgaataatttctgaagatgctttggggtttactcgattgttgcagctaacaggagtttctcttaaatttgataggttcctaaaatcgaatttgggtttttgtttcctccgatttaaaatctcttttcatctaggtttatagatttgaggataataacaaagtcactgatgttgaatttttcattggttttagatttataagtcactgtatttgcatttcttatatctaagtttagccctacttcttctgttccttaccttggagtgttaacatataattagctgtcttctttgaatacattttaaggctttctggatatttgcataaggtaacgagcagcctctgtagttttcactttccattgcattgtcatgttaaagcttttgtcttcttagatttggcattactcatcatcatctgtggctgcaaactgatccggtgtgtgtg

SEQ ID NO: 29687 - DNA, 583 bp, Arabidopsis thaliana columbia
atttgatgcattagtgaactacttgtcgcaacttataatcttgtgggttgcaaatagggttttaatgttaaacatctttctaatggttgtcttaatcggtaagaaaataaactgtaaaagtgctttacaaaaacgtgactctttttcttttcaccacaaacagaataattctaacataagacagagagacacacgtcacaaagtgaaaacaaagtatccccatttaaattaaaacagtttaacaagataaaatacaagtccgattttttcatctcccaaagattctcacagttaaaaatagaaaatagaaaaagtatatattctcacaatgctataaacgcttgaggagcatctgatttatcaataaagagaactaaaactttacaaatccaaaaacaataaaattatataaatccaactactttaaacgattttccaactagaaatttcgacttgatgattatagtgtcactgttttgcgtatctttatttaaatctaatagtctcatggttcccacatgttgaaggaacagaataactaattagaaaactagtacttatttatcgataaagaaaaatatta

SEQ ID NO: 29688 - DNA, 472 bp, Arabidopsis thaliana columbia
tgttaacaagatagtactatctggtaattcagtagggtaaaactaacctgtctcacgacggtctaaacccagctcacgttccctattggtgggtgaacaatccaacacttggtgaattctgcttcacaatgataggaagagccgacatcgaaggatcagaaagcaacgtcgctatgaccgcttggctgtcacaagccagttatgcctctgtgaagtcttctgatacctcaagcttatacttacaaagttcgattcggttcgtaatccattcgactctgtctgtttctgaaagagagtgtgtgtttttgcggtgatgggtcagcaattgcgtcgagctgttgggaaaatcaaagaagttgagagatcatcaccatcaagagtctccattgatcggagatcgcttcctacggaggagctcagtgccgtgaaatcgtctccgtctacttgccgccgttgatggatgttctggtat

SEQ ID NO: 29689 - DNA, 840 bp, Arabidopsis thaliana columbia
cactagctctgcccacactctctcgatcatttcctttcgtgttcacaaattatttgaagggaaataattaaacgagttggaagataccaatgtcaaaaaccgagatcgatcggaatccctcactgacatgaagactgtataaggatctggaatatatttaagaatgtgttattatgtctttaatattttgatcaaagatgtgtctgtattaatttagaattctttacgtttatataaagatagtgcatgaatatatttaaaagtgcaacacattttttaaaaaaaaaatcaagtgtaacacatttatttcatataatgtgttatgttattaaatattagtatcatcaacttatcatggattcatataaccaatacacgtcagccaaacctattaggctattacatatcatggtattatattgatattaatttagatgttttatgttcccatcagtcatcgacttatcatatagtatcaaaatttgatctataacacaagccccaaaattggacgtcgcttctctttatattacggtagataccatttttatttacgatgtacgcttcatataccttaaattaataacgtatatattatatatatgtatacaacaatgttgatacggctattgacatgcatataataaagtatgggcagataaaaacgtgtgttatatctattgatagaactagcttagctttacgaggactagagactagagagtagagagtttaacttttatatagatgataaacaacaaaaatgttcttaaagaaaaggaaaacgcgaacaataatgtggtagtctggtagagccgtagaggtgacgtgaggattttg

SEQ ID NO: 29690 - DNA, 759 bp, Arabidopsis thaliana columbia
gcataaattacaaatttctctctttctcgttccttaagatgtgggcaaccaaaaactatatgaatatgatctctcgaaagaaacttaatttcgaatactatataataaatggattttgatgtatgaatgagaatgttttgaaactatgacaagagaatttgacttttcgttatcaagaatttggatggctaaattagatatggaagttaacatacacataaaaagttagctgaatgttaaactgtagtctattcgaaatatgaagtttaaagtagaatgtgaatggtaaatgttaaagttaaattaagatacataataattggttcaaacttgagataaccaggacgaaataattggtttggtacaaagtacaaaacaactttggttaaaggaatcatactttccacgaggaatcgccagttcgccaccagttggccggatcgaacggtgcctactgcttaacccggtctttagataatacccacctgttaagtcattcgggtcatctctgacccggaagtttctaatctctctctctttcctaaagtaacaaactttaaattatctgcaaaatcgaataacgaatcatcagcccgagaagcttcttcaatcctgtaaatttttcattctacgtaccaatctctcacttcccagattcgtgtcttgcttccagtgctcttcctttgtaccaatcatcatcgtccaggtgatcggtttactaataattagggtttttgagtgatctaatccgatctctcg

SEQ ID NO: 29691 - DNA, 899 bp, Arabidopsis thaliana columbia
tgctaacgcaatgtgatcattcgtagacatgatgaagtatgacataaccagaagatgcaactctcagatcctctttaaggaagaccagaacaattattgcatctgtccatgaattatagctctcatttcactatttttaccaacaaaaatgaccatttttacccacaccatatgagaagatactcaatataaaaccttctttcttttgtacgtttttttgcagcccgaggaatagttctaagaacttaaaacctttttgaagcacaaacgattttagctgttgcagtaccaaacaagacaaacacaacataaacagtgtaaaaccaaatggggaataaaagtgttaaaagtcttttgactttttagtctcgccctcttttgagtttgtctttctctgaaaatcacttcttcagagtcttttccttatctatgttattagagtgtgtgcttagaggcacaagtctccctccctgtaaacacaaatgcacgtaaaacatgaggagggcctaagagaggtcatctttgtcttttaatttacacttgtcccggggtttcaagatcattcactggccccaacgactaaaaatgcagactctcgatccctttaagattagcctcatagttcttcatgactgaagtagtcgcccttgaaggtgatgatagcttgttgatctcagatgagacgataggtgagtttcgactaacagggatctttgaattggagcctgatccagcttcaacgatttgagggtttgatggctcagaatcagttcccagaactgcagcttcgcgactactggatacagcagcacgtcttgatgacccagttgcgcggagaaagctagagcttgataactgtcacaagaaaaacaaacagctcagttaccattaatacaaag

SEQ ID NO: 29692 - DNA, 511 bp, Arabidopsis thaliana columbia
gttttcttaatttgggcaaaaatgttgtatgtttctaggtctttaaatagaaaactgaaatcagaaacatgtggcaatattgagaagtggtggattctatttttacaaagcaattagtattcaaaacaaaccattgaatatttcggaaagccgattccataagaagtggagatagagtactttattggtattagaagacatcgtgaaggaaggaatgaaagaaagaaaataaaagcagttgatctcaacctatatatggtgtttgatttgatttttgtgtgttttacttttccatcaaaaataaataaaatgcttaccattgtaatttttgaataagaattataaatatgagcctctataccgtagaaatttgcatcttaaaacaaaatttctttagatttgagttgattagcttaacgggaaaaactcttaaatatgacatatgcttcaatttgatatgtatttatttatttatgttttcacgataaaccttcgacaatatatttatagt

SEQ ID NO: 29693 - DNA, 701 bp, Arabidopsis thaliana columbia
tctctttgatgttgaactcctcaaaattgtacccaattgatgtaacatcgacagtcttaactcacgtacatatatataaaaaaaaaaagagtatactacattggcacatttgtgtaaattgagctcagtttatatcatataatgttagctctttttaggagtgttaaaaaaaaaaatagccatgcatcaccaactaactgttcatcatgttaattctgcttcctctttttagttatattatcccttatagtgaggtaagttattataacatttcatagaaagtttagaataaaatgaaatgtgaacacaaaaaccagtgtaagcagcttctgttgttttgactttattgagtagccaatgttggttcaatgtcagagtcatcattaatggagactgcaaaaataaaagaacaagttgcagtgacgcattgtagaagtccttcaatgagtttatgtctttcaaggacaaaacatatcaaatgaatccacatttctctaaataagtcctttcttgaacgttgaaactgtggacatcatgggagtccacgtgcaataaatgccagtcctatatctaccacttaccagctaagctccgtctatttaatccatcttcccattttaagctactgcatttatacatttctctaaccaatcctcatacatccttttctgcttacagattttgtttggctggattaatta

SEQ ID NO: 29694 - DNA, 719 bp, Arabidopsis thaliana columbia
taggaaccaaaacagaaagaggcaataaaatcagaaaagagccaataagacaacaatgtaatataccgagaagattaaaacgacttgagtaaagcaactaactttctatcgaaaattcaggaatactttcatatatagtttcaatttcatgaagcaaattaaataactatcaccatatgcaaattaatctatgaaaagatctcacagtcacagattgatctcaaatgacctcgatacatcgcattgagatactacagcaaaaagccaaaaagtcaaaagtatatactttactacgttaaaacaatattcaacatcaaaaccccaaaacatatcaatcagacaatgaaattacaaaactgaaatcatatatcctcaaatcggtcgtcatcaaccatggttacactgaattagaaagtgctgctacatagaaatcgaacaatgaagctcaccgatagagtaaaattaggcatgcttccatctccgagagctaaaatcctagagaccaccactctctgccgacgctaaaggttgaagatgaagaagacgacattgctttgacgggccttttaaaaatattaaaagagagacacatcaatacctcgtggcccatttatatagagcccgcttaattttgtctgattgttgactgttgacttttagggaccacatgaaactattaaacgacttttcggattcaaatattcattgagagattattt

SEQ ID NO: 29695 - DNA, 543 bp, Arabidopsis thaliana columbia
ggatgtattttagctggacatggttgttctggccttggtttatcgctgtgggtcttgcgggttatggaatttactgtttccgtaagcattggcttggcgaacgaatgcctttgagcagcttggtattgtaacttcagtcttcacatggctaacacttgtgcctcctgcttatttcaatggttatcttgaaggctggccttatgtgttcttcttggcgtatcattacttctttttcttcaatgttagcgtgagaaaacgcctctatggagatttctatgctcgcactcatgatcccaaatgggatgtgaacacgcctctgtggtctcggattttgtttggtgttggcatcatggttggacattggcttgcagcttttgaagggcctgagcttcaccgattaccagggggttgggccaatgtagggatatggattttgattgtgattacaatgcttatgcattatgattcaacgctatatcttgctagatattctgaaaaggttgttgtccaacggctgttgtgcaatttggtccttatagatgg

SEQ ID NO: 29696 - DNA, 454 bp, Arabidopsis thaliana columbia
ctcatacacaagataatagaggtattaagaatcagttaacaaacactactagagttcataaaaccaatgaatcaagaataatctaccgtggctccaagcagcatacatatccaaccctcaacaaagcacaagtcattaccagctctaccaaaacccaaacaaccactgattctgtgaggcatttcatcaaacacttggttggcaacaacaataagaacagagcaagtgacatttggacaaacctacaagctgaaatcaaaggaagcatatgcggaatcaacaataacaacgaatagcgaagaacaaagcgatgaagttgcatcaagacaaaaatcgacgagagtcacatgaacgaatatttgacagagaactaaccaggagtagcagtcgagagagagatcgaagcgagggagagatcgaagctaaagagagagagcttcgtccgcagagagag

SEQ ID NO: 29697 - DNA, 974 bp, Arabidopsis thaliana columbia
aaatggttaatttagacactcaaatttttgtttgggagagagagaggaataaacggcaatgtaagcgtagagggatgatgagaggctaagaaaatttccctctctccatctcttttgcatctcctcctttcaaaaatactctctctctggtttttccaggttgagatactattaaggggatttacacgtttacaaagacaggacaattcatttcttcatttctgtattggaaccttgcaattactaactggcttttgttttagagttttgagatttgcatcatgggaactacctacacttatgatatctaaacatggtctgcattcttgatttttccgaacctgtttcaaggttctcgctttttacgtttctctgacgcattacaatccctctctctctctttgtatgttttgtccattggattctggtggcagtttcttcggtttgattatcctcagcttgtcttttacatcagcaaggaagcgtgatcatctcaggtcaaaggtgatcttaatgttttcccatgcttttttttttgtcatcatgttgcatagcacaaaacatcttaaggtgcttttattgatgatgtaggtgagctactttataacggaagaagaatcgtcattaacctggagatattccgaaaatggacttagcttctaagaagaacacagctaatgtcggttccaaggagatagacccaataaaacctaagtcgcctcgttcaagcctctctccattttcacttaaactaggagacaatgttccccgaaaccctcattttgatcccaagaagatggatcctctcgtcaaacatcaaccgccaaagtctcttgaacctcccccctcgactagagggaccaatagcgagggtgacttaaagcataacacctattctagcgatggtgatagcttagcaatgcggaagaatgctcctaaaaatcttcattatgatccaaaaagattgtcctttg

SEQ ID NO: 29698 - DNA, 535 bp, Arabidopsis thaliana columbia
cgtagttaattaatcctattagaaaacgtgaagaagacaagtcgtaccggccgaacgaagtcgtactggccaaacgatgtcgtatcgctgcaacaagctataaaaaggccgcagccaatccatagcccgtctagggggtttgcttgataaactgtgtgccgtcttatgctactataaacgacatgtggacaagaagagatggcatgtagtttaaggatatagatctttgaataaacgacgtcgtcttctttccaatcctctttctccgggactctggagtcgccgaagctgaaacttcttcatccatcatcatatcatatgaattttttctagtgatcttctttttgattgagaacatgagtgatcaagaaggagactgggatttttacctcagaatcctaagcaacagcgcgcgggattctacggatcctgcttctgatccatctatactacaatcagtacgcatcttttgtccatttattgagaattggcttgagactggtattaagtgatacattgctttcgttttgtttga

SEQ ID NO: 29699 - DNA, 626 bp, Arabidopsis thaliana columbia
cgaaagtattactgatgattagagactgtaacttgtaagtattttgtagcacaagccactgaaaattacattacacataaaggagttttctttaacatgaaagattcaaaattaccaggttggttctaattaattacgttttcttccaaagtgattaattactcaagtcacgatgaattattaacctttctctttttttttttttttaaattagtctatagagacttttggttcaacgaacgtaggagggagttttaaagagctccggtgaaggagaaaccctaaaaacacactcgattttgcagccagagagagtctcagagctccgagattcagacaatcttcatcggtccggtacgcttttcatttccgtttattctcatcgcaaacggataattatttgtctgatccgattttaccctgtgattaagcaccgatgttccttcctcgtagttggtgatttaatgcttcttctcgaaactatccacttataggatctccgatctttacgagattactctccttaatctctgttattgatttagtcacagcattttctgatttatcaattagttattcctttgggctcaatgttaacctcctaagtgattagtgattacgataga

SEQ ID NO: 29700 - DNA, 502 bp, Arabidopsis thaliana columbia
atctaatccgtacaggttgattactatttgcctcatggaaatgtggaaaaccaatcgaaaaatggaaaaaatcaaatggaaatgtgacgggttctaaagtttacttacactgaagtcgatacctccgctgttgttgtggctggagaagctgcttttgataaggagtaaataagaaagtggaaaaccaacgatgaacacgattatcagcagttaagaaaggggaaacccacaaccctaatgctgcaacaaatctacagatctgcaacaaaaatattaatcactatctgaatcaaacgaaactcaatcgatatagggacttattcaatcgcggtggttgcgggttaatagtttacctacaccaccgaagaagtgaatccgggccaccgcgactattcactgctgtttgtgtagccggaacatatggcggctacaaaagtttgaaccagagaagagttaacgctgttttgtgtgagaagaagcagcgacaaccgggagaagagat

SEQ ID NO: 29701 - DNA, 945 bp, Arabidopsis thaliana columbia
agtctttgtgataccgtgctagttgaaggtaagcgaatgagcttcttgtttgcgtatttctccgagagattcatatagagccaacgcctctcttatagcgtcactggctgataatacttcacgtattctcaagtcgctggattttccatcagaagaagaatcatgagtgttatccaagatgttcgtctgttcacgagctgcagcggttgtatcatcatttgctaaaagcattccaaatctgagataggtattggcaagctgtgtgtagacttcaactttcaaattgtctgaaactgaactagcttctgcagtggcaacactgagttctgtctttgctgccatgtaatacctaagtgacttgctgtattcaagttttgcagtccccagagctttttggtaagcattttcaaaagcacgatgcagttcgagagcttcgatctttggaaccatttcttcagctagagctcgtcgcccgtgacccaagttgcagttgatgagtatgacattagtatgatcgcaaacttccttgaatgccactatagcatcagcaaaggcgtcttcagctttgttgagctctttgctcccgagacggttccgaccaagttcattacatacccaccctttctttctcaaaacagactgaaactcactacagttgcttggaagctcctgtaatgctcttcgtgtttcctcataacaatttaaggcagccaacagattgctttctgcatcatcagttttagaccccttgagatatttgaatattccaccttttttcgctcctggagtttccttagagttagattcattctgctccagacggacagctccttttgtctcacccgatgtgtcttcttcttctttacggctcttgttctcaactttaaaattaacacgttcatcttcaacatctcgtgagaccttgctggcgacatttttggactg

SEQ ID NO: 29702 - DNA, 1255 bp, Arabidopsis thaliana columbia
tcaactttataaaaagaccaagtgcagttttcttcaactcatcccacatctgcacctaatccttcatggatcttcctaatttgaaaaacatagcagctgtgggccatactccttttttgcaacgatgattttccttcttcatacaagcgtagtggataactgcgggtatgactagaagacgtcattcctaatcatagaaaaaagcgaggttgcataagcaaataacttaagatcttaggtgccttgtgagattagcaaactaaaatcataacaaatctgtcacagaataatccagaaaattgattaaatctgtgagaacacaacacaaaatcaatatcaaaactcagagaaaggcgagaattttttccaaaataaattcagccgtaattggccaccataatctgaattaccagaataacaatttctctttatgaaaatcctaattgaaaagctttacttgctcaagaaaattattttcaataaacgattctaatgacattgcccaaaatccttactagattataaagaattatgaattggaattatcaactgttaagcgccgaagtaatgctaaagatctgcaacaaaaaggatttatcattatgagaatcaaatatcacattaatcaatcgaaaaatgaaaaaaaaaaaatgcaaaggtgacaggttctgaagtttacttacaccgaagtcgatacctctgctgttgttgtggtcagagaagctgcttttgataaggagtaaatcagaaagttgaaaacgaacgatgaacacgattatgtgaaaataagaaaggagaaaacccacaaccctaatgctgcaacaaatttgcagatctgcaacaaaaaatattaatcaccatcacaatcaaacgaaattcagtccataaaagggacttattcaaaagcggtggcggcgggtcaatagtttacctacaccaccgaagaagtgaatccgggccaccgcgactcttcactgctgtttgtgtagccggaacctacggcggctacaaaagcttgaactaaagaagagttctcacgccgttttgtgtgagaagaagcagcgaccaccggagaagagatgtcgccaagtcaagcagcgaccactggagagagaagtcgcctagtcgagaagccaccagcggagaagagaagtcggcgtatcgagaagccacaccgggagatttgctagggttcgattttgaaacgaaagaagaagaagagacatgcaaaagcgaaaaagagagaatcgagaaa

SEQ ID NO: 29703 - DNA, 335 bp, Arabidopsis thaliana columbia
ttttttctaattttgaatgaattgtagataaagtagaagcgcaaaaagaatgcattggaccatgtgatatgtttacggactgtcaagccgcttgcgtcgggattaggaaaggatacaattatggtcaatgtgttgcctggaagcccaaggatgacgatccctttacatgttgttgctacaaattaactccataactaaaacaacatatatgttttgaaatcatcaataccaattttgattagttcaaatcgggttgtaatggaagagaagcattgacatgatcgttggccaaacatcacatgactagaaaggagacctttcttctgtaaagcaca

SEQ ID NO: 29704 - DNA, 795 bp, Arabidopsis thaliana
ccgcagagtcaacagcagtgagggtgccattatcgggagcagtaaccggagcagcagcagtagcaaccggagcagcagcagcagtaaccggagcagtagcaggaacagtagcagcaacaggaggagcaggagcatcggatttaacatcagtagtggaattggtggtagtgctctgagccgctctcttggccttcgatttgttcgacttcccagccattttcacctattagaggaaagattcagaaacgatacaaaagtgattgaatttcagaaagatcattcatttgacggaaacagaggaagatgaggaatacaatccaaaaggggggaaaaagtcacagatacgtaagggatagatggaaatggagaaagaccaattcactaaaataagtaaagggtctagtagaggatctgaaaaggaattacctggaggggtcgagagaaatggagtaacgggagagacgacggagagagcggcggagtaggaaagagatgaggtttaaggagggttgaagtgaaagaggcggctgatgatattctgactcctctctatgtgttagagctgaatactaggagagagatacagagaataacgaaccaatccctcctttttgggtttctaatgggctttgtttgggcttttttaaagcgggaaagatgcgaaatttattgcaaatcatcagaatcttaagcaagttttcagatacccacagtaggagagaataatcactgaccacgatattattattatgggtataatatttgtagctaggaggaacaggtgatatgttataa

SEQ ID NO: 29705 - DNA, 939 bp, Arabidopsis thaliana columbia
tgcatttgcagcattttgaaggccaaggaagcaatagagtcaccagaaccgctacagtgcctccacctccgccaccgccattggactttgattttaagaatccaccagacaaggtaagctggtctatggcaaacgcaggagaagaaggttggatacctaatattggggacgtcaaggttcaagactcagtgagacgagattggagcactgcgtttacctttatcacaagccgaaaccctagtaaagtgtcggcttgaagactatgatgacctggtggcgatttttgggttgttgcatctatggtaagatacacagatatgttagggttacttaattggataattcttgtttagtcttcattcatcaatcatcaagttatgtgtactataatttttgtagcggtttttggaagaatatgataaggggatatgcatctttgtgtttgcttttggaacgtgataaccattcgacttttgactgatgaaattgaagacactgtcgtagtaacaaagctattcttcttagacattttgatactgaactattctgtgttccaaagtcttttactttgtgtttaggaaaagatcttgttctttgtgaaaccagtgtccgtaattcaagaactaatgcttgacatgtctcacctgctcaggttatctaaatctaatggataagaagaaacatcaacaatactgcactgatacaagacaagaagcgtctgtagtccaacggttaggataattgccttccaagcaatagacccgggttcgactcccggcagacgcaattatattttcccaaacataattttagattttgttaaccaaacaatttgtggggttcgaatgtaactggttgtagcacatttaatatctgcaataaattatcaaaaaggccattggaactctcccaacccatcgtctaatttagtaatttttg

SEQ ID NO: 29706 - DNA, 1227 bp, Arabidopsis thaliana columbia
gattgtatagactttataagagttttacaaaggtttaaaatccttgtaaatccttttaaaacttcttaaaaactcttgtaaatcatgttttacccttttataagcttttaaaatccttgtaaatcattctataccacttacttatcttttataagcgattgtaaaccatgcaaaccttttttaaaatcccttgtaaatcattatttgacacctatttatactttgaaaacgattgtaaatcatgttaaccccttttaaaatccattgtaaatcattcaatgccacttacttgtgcttttaaacgattgtaaaccatacaaacacttttaaaatcccttgtaaatcattctatgccacttacttatgctttaaaagcgattgtaaatcatgttttacccttttataagcttttaaaatccgttgtaaatcattccaataccacttacttatacttaaaaaaaacattgtaaaccatgctaaccctttttaaaaatccttgtaaatcattctatgtcacttacttatgctttaaaaacgattgtaaatcatgttttacccttttataagcttttaaaatctcttgtaaatcattcaatgccacttgcttatgctaaaaaacgattgtaaaccatgctaactgtttgtaccgaggttgtaacaataattattaaggggtttggggagaacggagtagcttctttattaatgacgaacggaaaagacggtaatttaacagaacggagaaccgtaagtacagaacggagaaccgaaagtacaaatcggaaaaccagaaaatacaaaacgggaaagcaagagataacagagctaggcaactattctctcttaaattctctaggtaataactcctgctcccttttcccaatagtgtcttctgctatttataggctaggagctgacctagggtctcccctgcgactttccatttttaccctcttaggtttccatttttaccctcttaggtttgtctggctgggccgaattgatgttgttggaccgagcaacttacatctgggccgagccggtcgatctaatgggtcgattttctgatgggcctttcttttggtgggccgttttgacttatttatcttgtgtttgggtcgaactgggcatgaagggcaaggcgcgtatcccacaccatctttgatggcaaatttaaaattggattatcaaactaaaaatgtatgtaacaataaaatttgtttatca

SEQ ID NO: 29707 - DNA, 514 bp, Arabidopsis thaliana columbia
ccctcatcatatggttcaatgctactgtgtatactccggatgcttctttcaagtaacagtccaaaattttaatattgtaattcttgtgtgtgtcattgtaaacaaatatattaaatcgtatcgcgattcattaataggcggtgctatcacgtatgtgatgtctgaaaatatctgtaaaaacccatgcttgtttaatatatttgtataaaacatgatctctcgactagtatgtacgtattaataaataaatgaatccagctttttatatttgtcgaggacaacacggctctttctcgcgtgaaaataaaatctacgtatacgaacggtatactagataaacatctgacgtatgtctacattaatatttaagaggaatcctatctccgcaaaacaaagctttaaattcagtaaaatatgtgtaattagttttatctttgatcaggttaccttgccaaaaccaaaaagccctagttgatcctcatcgtttttttcatgtcatataacgtactagcgt

SEQ ID NO: 29708 - DNA, 516 bp, Arabidopsis thaliana columbia
gccagtgtgctctaaagttgatcaactcaacggcgtttaccgtgtctggattggggttactgaatgctagataccaacctagataatactgagccctaattccgccattgaagcagtaaaccaacagtatgtcttcttaatgtctgtactcattcaggtatttacttgtagtttcgagaactacactcgtcctatatagaacaagtacggtatgtgtctaacatgatgccttcccgaagctcagcccctgcccaccacttcagcggcacgtagaggacatggccactcacacatacgccaagtgcagacgaaccaaacaatctacagtatagctctatacggcaatgccgagccccgcgtatgtgtccgaaaatcgcattggcatccttccacttgtctgcactatctatgagcaaaatagatcatcataagagaatcatattgctggggaagtagacgacctacgctgccgtctaggtgtatgctgcaattttcacgtttagtgaatactaatta

SEQ ID NO: 29709 - DNA, 781 bp, Arabidopsis thaliana columbia
ctcattcctattaatcttcccacgggattttatgaacatagtcgtttgactaggatattgttctttctgtctatgtaggcttgaagctaagatgcgtgcggaaggaaggattatcaagagagattacatgactccagaagacagaaagtggttggaaatggatgtcgaggatagtgttgcacttactgatgggaattttcaagttcctttctatgaaaacgaagaatgggtcacacagtttggcgagaaaccgtgagtctgcgatgataagattcttactagatggcttacttcccaacactaatttgaacggttttatttaatattttgatttactgacctcatgaaatatattgctggactaggcaataacttgatctaaaaatacaaacagaaaaatgtctttttagttgatttcctctctattccttattcatacatatacattgtatattatatggttttcatatcagggagaaaggtcggtatcgctatgctggtcaatggaagcacagtcgaatgcatgggtgtggtgtctatgaagttaacgaacgcatcctatatgtgagtagtaagaaatattggtcgtttacatcataattctatctaatctgatcatcataaaatagcttagatagatggcatctttgtacttcatgaaagatttacattagtgaatattcatgtttctgacactagttcacatcttaatggtaacgcagggtagattctactttggggagctattggaggaggagcatggctgtacagtagatatttg

SEQ ID NO: 29710 - DNA, 668 bp, Arabidopsis thaliana columbia
tagtaacgtgcgccagtgtgctctaaagctttagaggtatgcgaaggatgtgtgaccataacctgaggtctttcctgccgatcagttgccctgatgggtgacgagcctgctctgatccgaacaggcacttttggaaacttgatctcttcgctagccctctgcaggggttccccatcatcgtcactttcgtcgctcaggtcactgctgtcatcttcttcgacgtctcttgccttctgctgttccctttgctggcgttctttccgatgtgcgcgcttctcattccgtaaaggattccggcgcccgatcccatctattgtagatttccccgtcaccatgcccccttcgtcatcctcgccgtcttgtccaaatccagatctctgcgaatcattcaaatccctagcgcctaactggtaatattcggacgagaccgctgtggccgtaggtataggaggagaatatgtccgttttatactggcagcaagttgtgatgggtggttggcggaggctgctggccagcctgcggcgcggaatccgggtgtattgagacagaatgattgacattaatgagtctgtcgccaatgccatccttgattgtggagaggtaagaagtgcgtactgccaaattgtaaagctgcaccaattagcatagagaactgaaggggagggga

SEQ ID NO: 29711 - DNA, 616 bp, Arabidopsis thaliana columbia
gtggctacctattgacatagcacggatgtggagtcgtcattggttagaaccgttgctttcaccaaattctgatgttgtcattccagcctttcctcattccaactacttatcattgccccttttgagtatcctcaacattgcaaggtaatgaagaaatctccatctgagtttatagggccaaactctggcctcaatatgatttctcttcttgttgactatttgcttgcagagagttcgggttgcagtctgcaacattggagatgaagtcgatatctgtgccgtttgcctggaaagaacatgcacagttgctgctgaaggttcggtctaaattgttgtcatatcctttgagagatgtttattagtgtcctttgaaaaaaccgggttttgtgtttcaggttgtgagcatcagctatgtgtgagatgtgcgttatacctttgctcttcaagcaatgttccctcggtgacagttggcccgcccggatcaattccttgccctctttgtcgacatggaattacagcgtttaaacgactcccaagctccctgacaagagaaatgaagttaccatgtcactcgggttctgtgcaccatgtatgcttcacacgggagacacaacag

SEQ ID NO: 29712 - DNA, 1101 bp, Arabidopsis thaliana columbia
taatctgactatagataattctatatcgtgccaagaggaaccaaaataaattgtacatgtcgtttgattcattcctttaatttattgtgtaaagaaggatccaatcctaacaaagtcttcaaaaccttcacattttttcgaaatttaacgacaactatagggtttctagctagatttgaaagttttttcacagttacacctttacctatctgcagtaatacttccacaaaactaacgttaaacttctgccggtacaaatacatgtgcttatgtaagaatgaaaacattttgaatttaatattttgcactggacacgtttttcttttgccattatggattttcacatagtgacggatacgtgtagatccgccgatccctatgacaacatagcattttggaatttgtttacgttcaactcctttaaataaatagttaaggcagtgcgtcactatactgcttattactacatagtctaatttggtatatgctttgattatggatttatgataatcaaaagttatatggtataccaattgtcgttagctcaatgggtaaagaccctaggcgaaacttagaggtcgccggttcgtgtgatgtttgggacgaaactaatattacatgctgtggtttcgggtctgaggggattacgggtttcggccaaaacttcttggatttcaaaaaataaaaataaaaaagttatatggtatattcttttggatatttcattctctttttaatttcgtttcgccttaaccgcattctctaattaaaaatttaggtacatgattcacacttttacagtttagcaatgtatacagtttcgaaacaaattcagtttccaatgcccatgaaaacgcgtataataccataaaagtttatgttctcaaactagattgagattagtggccaattgatcatgcatgttccatttaactgaagatatacgtaaacatgatcaatcgtccatgagaacaatttcagtcttgctacactaaaatgcaacggatcgtaaaagtgatttatattttcatagaaccaccacataaataatttacaattgaattcagatcttaaaaaacatagactacagaaccaattttg

SEQ ID NO: 29713 - DNA, 924 bp, Arabidopsis thaliana columbia
caactattatccttaatcacatggcattgccaaacagactacaacatatattgtaattagtaatcgcgttccgtgtacgcattctctcaataccatttggcatttgcgtaagcacctcaagagtttctctgtgtttttaacattagacttaaaaccagagagaatttggccatgtatatatgtccgtggataaaaactgttacagtatattataaacattgtctctactcaccatattcaacagatatatagtatatatcatgtacatgtattaattttacactgaataaatctataaaaaaatatatattgcaacccccaataatatgaaacgaaaaaagatagaaaacgcaaacccactacggctttagtacatacattcatatatatgaatagatcatagatgtgcatttcaaagttatgacctgatcaatggccaggtatattttcacactgtttcgagatgatagtgcaagtgtacgtcgagcgtggcgcgcctacggcccctacacaacgttgggtggtaacgcatcttatacagagggaggaagagacgcctcctggaagtggactgaactgatcatcatggcgattagtggtcgccatgttcttaaaacgtttacctcccccgcaatgttgtgatgcgcttggtggaacatctattttggaggttacgaagccattacctttcttgttcctcctcatcaccatcgtctcttctgcattactttcacacttataatttatatatagcctcaagccattgaaaatttcaatgatatgtaactctttagtttatctatatgctgaactaattacaaagctaactagtaagcaactcaaaaagcataatcactagatcctaatattgaaatacagagatctttgagaatctttaaaaatattgtctcttttatcaggtgc

SEQ ID NO: 29714 - DNA, 762 bp, Arabidopsis thaliana columbia
tggtaatatccccgagtgcgtgggatatgtttcacccggtaccgtggcccttagtaatatctcatcccttactaggcgctgcttatgtactattttccaaacaagccgctacgtgttagtcgagctttacttgtgcccaagcgatcggcatttggatcacgtagatcatgcctgatgatcggggattttaattgatcggaccaagcgtatgatcgagagtgcttttgttgtgtaagcagctagttagaattagtggcctagtagagtcatgggcagataggtattattttagataagagcaaaatcggatagagatgagatttggataagtatggttgtggataggaacgagaacagatagggacgaaagtggatagggacgtgagtggatagggacgaggtacggataagaacgagtgtggataagtatgaattttggataagtatggaagcggataaggatcgacttgtggataagttcgttcatgtctatccgttccatatagataagatcgtccgagtttatccgcgtacggataaggtcaatcaagtctatccgcgggtttttggatagagttacggataagctcgattgagcctatctcgccacctcgtgcatcccaaaccgccccaccacccctataaatagtcattccgcctcattctttctcattcacaccaaacgcactaaaatctctctgaaaagtccgtgagtgagagttgagagtctggtactgctgaggctctgcaaagtagattagt

SEQ ID NO: 29715 - DNA, 645 bp, Arabidopsis thaliana columbia
tagtaacgtccgccagtgtgctctaaagtatatatatattgaaatactcgtaagcggttcgtaaactgcctctacgtgcataatacggctagttttatactcacggattacaaatccggtgcctgagaaatcactgtaaacccacgttgcgcactcacttcttgttgattcagctcacatctcaagccatcttctagccttaccctcacagagtcacatctgcagacattacttttcagaatctcgtattcgagaagctcgcgtacggaaagatggtccaatctgagtgttctgagaggtcctgcccgttgtgttcgatacgctggttggacttcattttgcctttgcacttcgggtaccgtagggggaaggcaagataagggttacggcagaaatgaagttgaattaagccattgttctccttttctaatactaggatcagatattgagctttttctccaatcaaatgagaaatgattaggaagtcgaatgagattagaagggagttgtataagatatactgagaaaatatgtctcctgcataatacccacggtacagaacagctcccaccaaaaaaaattccctttgacttctctcattgtcttaatttcacgaatcaattaactttataaacaataatagaa

SEQ ID NO: 29716 - DNA, 1063 bp, Arabidopsis thaliana columbia
agctagctagctgacttacgaggtttggttggtaagaaactacgtttgacatcatggactctcaaacgcgtgagcacgtgcgtgtgctttttatgttcataagacttggaagcttgtacaaaacggggaataacataaacttgtctttaacatctcattgtatagggtttttagattattctaattgttcattggttaagttttaggttatgttgttaataattatcaaataatttcattaaatcaaattattgtcagattcaatttctaccaaatttttattttattttctgttttcatatttgttgggtttacatctatatatacatttttgcagccattttgtgatttacatttatatatacatcaataaatcatggagttggaacttatttacaatggttaccactggcttattcaatgcgaaaattaactatcaaataaaagcaaatcttattcaaaagaatatgctcttattccatggcctagttatttttgccaaaatggttaaaatatttaaaaattaaataattatttgaaagaaaactttaaattgatttaaattataaatcttttaataaaaatattaataaaaaaataaaataaaataatttcaccgaacatgattagatagtaggactagatggtatgacatgtttataatattataatatataaactttataacaattaaataaatatttgaaagaaaacttctaaattgatttgaattaaatattttttaaattaaagtattattaaaacaaaaataacaaaataatgtctaattttactgaacagggttagtggtaggacgggtctggtcgatagtattacgagacggtataccacaagtgaaatctattagatatgtttaatttcattgtgcatgattagatggtatgacgggttttgatcgataataatacgaaacgatatactacggatgaaatcctagatatgacaattaaaatctatatatatattatcttaaacactaaataaagcaaacaatattgataagacgaatatctacatatacattttatataacacattttat

SEQ ID NO: 29717 - DNA, 702 bp, Arabidopsis thaliana columbia
gaaccaaactgctttgtgccaagctaccacatttgatgtaggtcggataagattccaggtatcttccttattatacactcaacaaaattattatatcattatcgactattatcactttagcttttcctttcagctgtaaatttttctaataaacattataatatacacttttgtgctttctgctaaatttgattacacgaaatttctcaggtggtgtgacaaaaaagccaatgatttcatttctcaaggtaatcccctaaaccttaaaaaaattacatctgagaaaagaaaataaactatttttattacaacaaccactcgtatatatgtttctctataacagatcctgctacacactccacaatcgaaactttcagacaaagaactgcttttttttccttcaatcaaactcttttctcacgaaacttcacatcgatcctggtcgaaccaattgacgaaattaccatcgttaagctctctctaccgtcgccggcgccacaccggcatctttctggcgaacttgacggaggctgaattcaaactgtacaacgtaatttcccggagaccatcaattcccgatttcgactaaaacccagaatttgtttttttccggcgaaccggatacgaattctccggctaaccggagatgaagttcatggaattagggtttcgcctgacacattctcactgtggaacagtagg

SEQ ID NO: 29718 - DNA, 441 bp, Arabidopsis thaliana columbia
actaaatcacataaagcagggaataaattgaccaatcttatgcatgttaattaaatggttgacaaaaagataaatcactatgttaactgtttctattagaatgtatgggtcaatatataaagtttaatgtaaaagaaataaatcttctgtatataaaaaagaagaagtaacataataaactcattacatttttctaccaatatctctagatataaatgtaaaaaaagagttgaaaaaaaaaaatcttgatataaatgtggtaactaaatgaatcaacaacataaagatccaaatgtggtaactaaaccgtgggtcttgtgtttgctgggttatctatctcattctttgcctccgtccatcagcaggtccggatcttctctccggtgaagcattcgacttttccgtttaccctttttgtggctgttttctgaattgtatttg

SEQ ID NO: 29719 - DNA, 280 bp, Arabidopsis thaliana columbia
  unsure (1)..(280): unsure at all n locations
caacagcaaaaggttttaaaacactttcaaattcgtactcatatctctgctgtgcttgctcgtgccctaactcagtacgaacgatctccgcgcctggatgcgaataggtttcttgtccctgggattggcctttagtacaggttcacgactccgcaaacctatattggctngtgcgggaggataagagctcattccctctgccacacctttcatcttcttctttttgtccttctgatcctgctgtacataacgatgaccagtcagtgatttattgataccc

SEQ ID NO: 29720 - DNA, 608 bp, Arabidopsis thaliana columbia
ccccaaattataactaattaattaataattataaaatacttactaaaaagttgaaagaaagtaaagagtatatgtttacttgagacccatgatggagttgtactctaaattgccgtagtccgggttggattcgtggttagtgacagttaaccagatggttgcaacactgagaggaaccacacttagtctgagacatgaatctatgatcttcaaagacataggagcttgtggttgttgctgctttgaagaactgcttctctcttcttctcttgtgttgttattgttgttatctctcatctctggttgattggatctgaaaatcaaattttttttttttttttttggtgtggttttggagaggaagaaagctataaaaattgttgaatagcttcaagtggatttctcagttagattatctatctctttatatataaaataaatatgtagatatatgtgtttgtggcacaatacatataaaaacaaactataatagatacaaaaaagttcctttaacttctactctttttatgattaacctttgaaaccgcgtggaaaaaaagaagaagtgatttccatagaaaaacttcaatgtgaatatggattaaagt

SEQ ID NO: 29721 - DNA, 416 bp, Arabidopsis thaliana columbia
tatcctatcttaataacttagtatgtcttttgtgtactaagtcatttagttcttttctttttaaccataaatacttccaaattcaagtctctcatgatttatttttctcttttattattcttcttagccatattgctgttgtttctctataaaatgaaaagcatatgataaacaaacatatcttatctcaattgtaatgagttttatgagtttaacatctaactatattctaatcattcaataatcatcaagatatgataagcaaacatatattagtttatttattatgtctatcttatgcatatttgatatctaattacgatattaaaaagaaatgttaaacatattaatacctccatattcgtggttaaatgactatgtactaaattatatggaaaggtgtggtgataaatgag

SEQ ID NO: 29722 - DNA, 594 bp, Arabidopsis thaliana columbia
cgaagttttgatatatgatatgattcttctatgacaaaaaaaagaaagaaagtattgcttatcaattgaaatcgtcttaacacggaataaccacttgtatatatttgtcccttacgcacaattctttatatcttcctcctctaggacctccaaactcgcacaaatttttctctagattttctatttgtcggcgtcaactttttttttttgttggttccttctccgatcccacccactaatagtttatgagctggaatcagatatcaacagcccaaaatattgaatggattttaataaatgccacaattaattccgaattaaaatactattatagtacaagtataaagagagagagtgaagaagtcgacaaatgttgaagaagaacaaaaataagtcgtacggaacaaaataatccagctgtctagctaagctatacagtatagcctatactgttcgtgttctcgacagcttggacccctttttgactacgattcacgaaccgcgtaacacgtttccgaaccgtgaccaaccaagggctcacgtgattcaattattcaccctgccaccatattataaggtattatatttaagtat

SEQ ID NO: 29723 - DNA, 546 bp, Arabidopsis thaliana columbia
  unsure (1)..(546): unsure at all n locations
tagtaggtctttcgatattaatgttgatatatactagagcctatagaagtcaaagtgattccattaagataatttattaagtaggtatttggatattaatattaattatcagaattatgtatggagctacataatgtgtaaccgctcagaaaacgcggcgattcgaccaaactctgttaccacaatgtctccgccacgcgatcacacttttgcgcttgcatgcgaacgttgaaattcgaacctctcatctctctatttaccattttaccctctagtaatttcgttttcaaaatttactatctccaaatattttggcagtccattattaattgccgaacattaaactgcggtctagacaaaaacaaacggcggtcagatataaacaactaaccaaaaaaataaaatacttgactggttttggacattttcgtcgatgatgatcacgcgctacgaatgagaccanagacaaagctcaacgggcttccatatatatttcatatntattagtactattttcccgaaaaaaaaaatatatattattagtac

SEQ ID NO: 29724 - DNA, 514 bp, Arabidopsis thaliana columbia
ccgatatttatgatggttaattgaagatgttcatatgcgttacttatgtctcattcactttcacatgccgcttaagagacgaaactcatcatactaaaccttttttataacatcattttcatttggtgtcctaaaatccaagaaacgaccatatgcatgtacacaccaactatgtgatcccaacaggcagatgaaaatcatgtaaaacccataaaagaagatagaagagaaatgctgaaagtgaatttgggggaagaaagagattagaagactaagaaggtcttgctcctttccaagagttctcactaccataagtacacacttcacagccaaatcttcaatggtttcaatcaatttctcaagaaagaccagatccatctgtgaaagaaggataagccgaaatcaagacccatttaagtaataagtttagcctggaaggatccgaaagacatcatgttcaacagaaatgtgaacttgactttgtaatgactaccatgaacaaatcagtgccaga

SEQ ID NO: 29725 - DNA, 578 bp, Arabidopsis thaliana columbia
cgttcagtttcattaaaactggttcaatttctcttctttcttaaacagtaggagaaccgaaaccgttcgaatagactggggtgcatacccaaagtaccacgcgcctgaagttttcgcaccattcatattagatgaccatcacttgtactatgtgaatgcttttgaaaacgcggcaagcacaatggagacaagtgcagtggctggtgagaacattgccagactcataatttccagattcatgacaaaggaatcattatcttcctcggacaaaagaagctgtagttctggtctgcactcagactcataaacaactttggtccccacataaacaaggactattggctgtgtgtgttttgaagaagaatatgatgtttatgtatatagacacataaaacagttttgagttactgattgtgtttgttcctcgtaacctaagcttcttcttttttttaatctttttcgagttcttgaatcagaccattggcattagcatacaaaaacaaaaacagagaaagttaagaatcttttagtaccagacagagacataaacagctacataagttgatcaatattagatt

SEQ ID NO: 29726 - DNA, 857 bp, Arabidopsis thaliana columbia
ccctttcatactcagattcgctgattatttcggtcttaaacgtccttgtctcttctgctctagactcgatcgtttcttcgatgcttctggtaaatctccttctcatcgagatcttctctgcgatgatcatgctctccaattacattcaaaacctgttgaagaatctaattgtggtttcggagaatttcacaatgatttggttcatcgtggttgttgcgtagagaagataagttcgtcactatgtgctccgattgagtctgactttgggaatttagattatccaattggagatgaaggtcagatttacaatggtcttaagtttcctcgatcgatcttcgtctttgaagaagagaaagtaggatctgtaaatttgaatgattctcaggaagaaacagaggagaagaaagttccccaatctcatgagaaacttgaagatgatgatgttgatgaggagttttcatgctatgtatcaagcttcgattgtaagaacaaagaaattgcaacagagaaggaagaagaaaacagagtggatctacctatagaggtggaaactgcagaatcagctccgaaaaacctcgagttctatattgatgaagaagactgtcatttgattccagttgaattctataaaccgagtgaagaagttcgagagatttccgacattaacggagattttatcctcgatttcggcgttgagcatgatttcacggcggcggcggagacggaggaaatctccgactttgcttccctgggtgaatcgaaaccggaggatgcagagacgaatctaggtacatcttcgtgtagcttttacttgtgcttttttttttttttgccttgtatctaagtttggtgagttg

SEQ ID NO: 29727 - DNA, 485 bp, Arabidopsis thaliana columbia
ggtcctaataagatgaatgttttaagggtttatggcttgcttaagaagagccaaaactctctataattaacaagtctaaaattgacaaaattaatataattggttttgttacatgtttgtgaccataactactaaaaaaattcacagaaaaactattcaataatccttgtttgttcatgtgtgtgatctattaatcaataaaatcaagaaaatggataggagaaatcaactaacgtttttttctcaaaaatctatttatttattttgattaacatgttttgaacgttagttaactaatttaccctacaaaaaactaatttaccgtcaaataaatgagaaatccccttaatgagaaattgattattttccaaaatatttatttgacgcaattttattttcatttttgaaaatccagtaattttacaaaacctaataatatactcaaaggaatgtttacataaaacattcaaaaaaataatttgttt

SEQ ID NO: 29728 - DNA, 495 bp, Arabidopsis thaliana columbia
gtcgactgatcccgggtactgagctcatatacttctttttaccaaagacatttattcaaatatttagtcttatatataaatatttattctctattcctatcaaaaaataaaaatatttattctgtattaagtgcattgagtatttcaattgaaaaaaaaaatatttctttcctaaattatataattgtatacatatttttcctataaatagaggtatcatttaacacacacatcatttttccctagattgttttttttttaaataactattttattaatttcgatatgcaatcaaatttctaagaatccaaagttacgaaatttagttacatattcgaatacaaaaactactaaaaatgtatgtatcaaaacatccattttcttatagtttccaaatattgatattgcttaagtcaaagacaatcacagtttctcaatcaaagccacaattcactgctttcaaccttttttaaaaaactatctcacgcgctttaa

SEQ ID NO: 29729 - DNA, 585 bp, Arabidopsis thaliana columbia
caatgttgattgatcctgttgactcgaagaaaaggaaaatcaacaacgtaagagtcaaattttatggtcaagggaagtttcattaagagcccatctgctttaaacgaattaaggcccagagaggcccagttttggaggtgaagaaaaacgagggaacatgattcttttttaattttgaagcacaaatcggacggaattggagattcttttgaataagagtttcgttcgagcttagagatggagaagagcgcttggtctcagtgtagagaaatcgagaattcaaagtgtggtttcatgaagaaaaaccctaattctgtccgagatagagaggtggtttcagccttgttgatgcttgcatccgcttagtgagaagtgctttgtcctaaagaagctgaaagcaaatgaaatttgtaaaagctatcatcacagttccaccgagaaaagactgactttgtttattctgttaaatgattttcgattgtttgtgcctatttcgattgtttattaatgtgatagacaatgttttatcgaacttgtggttccacatactatgagtgtaagtcatgcttcagttagataaatgag

SEQ ID NO: 29730 - DNA, 1107 bp, Arabidopsis thaliana columbia
  unsure (1)..(1107): unsure at all n locations
ggggaattgacatatttcccccttctaatagtaggatatggagatatttatacaatttactttttctttacctgctttggacatttggacttgatatataaaaaatttaatttttcctaatatttcttacatttcaatattatataacctaaaataagataatgaatttcaaaattcttatatctgtttttggtgagttttccttttttgggctataattattgactattgagctacaaaacctatttccttttttttttttccaccgtgtggatctcacgcggttttgaaaacagcaagacgttcatacgtctaaagctataaacgacacaaagtgctattctccttttctgagttaatgttcacacgtgggaagccaactgtaaaatcgtaagcatgcgcgctgttttttttgttgctagccgttataccaactgttcctcctactcatacaccaactattaatttttaaaacattcctcttttttttcccaacaataaataaaataaaattttcttcactttttttctttttcaatttgcttttttaaataatttaatatataaataacttcttctctgtcaaagatttttcctgattctttcttttttcctctattgattttttttttgctcattcgttgtttcctttcaggaaaagagaggaaacaacgtttcgtcttctcagattctttacctttcttaaggaaaaatcccaaaagagagaagataaaaatctcgcattcagattttagggtttctgacaaattctccgatgaaattcaagatccgaatctcggcaatgtcgacaatctcgccgtcattagccgtaattgcgtttctttttctgattcttctgaatctatcttcggttttcgctgatccttcgacggaaggaggagagattattaggttaccttcggagaagatcaacggtgaaaaaaacagaggcgaattctgtgaaggaattgctanaccggcttcgtgtccggttcagtgtttcaggcatgatccggtttgcggtgaagacagcgttacttactggtgcggttgtgcagatgctttgtgccatggctgtcgtgttgtgaacaaggagcttgtgatgtt

SEQ ID NO: 29731 - DNA, 564 bp, Arabidopsis thaliana columbia
  unsure (1)..(564): unsure at all n locations
tacgtaatttacttaacgatatagaataactataagaaagaaaaaaacggtgttgaaaatttgaaaataacgtttttgatatcgttttatgattaaaagtaaaacgatacaaaaatatactgtaataatataaaattactaaccaaattcgttattttaattctaagtacatctccttatcatttttgtatttatgcttcatatataaacatttttactaaatatattagtatcggtttccaagaaatattcagtgtttagggtattatctacgttagaaatttctataccgttaatgtagtccacagtttacgccaaaaaaacaaaattggctacaaaccaaaaacaatgcaatgaaggaagaaattggatcgaggtcgtcgaggagtgatgatgacacttcatgctgagatcatgcacaccgcagtattccacgtggcgcacatgaaattgggtttggtcgtcaccataggtttctgggcccactcctctttgccttcattttgagatttgtnttgtactttgtttgtcccattattcccnactctccctatttttttttat

SEQ ID NO: 29732 - DNA, 556 bp, Arabidopsis thaliana columbia
acatccacatttaaatttgatctagacattttcttatattaaactatatacatctctatcctaatgaggtattaactagctatagtttattcatttgtcggtcttaagctttattatttgtcatggcaagaaaaagaaaactttgattggttattcattgtggttgttgtaacgcttttttttgtttgtgttatttgaccccaaacataaataattcttcattttcttgcgcgttttatgattgcgttgaaataacatcttcactcgccaaacactccagtaatacccatttttccaacatatacacttctaatcatacccacaaacatacacacgttttaatctgcagcttcaaggatatgttgccttctttaattgaatcttatttaccaatggagaatacgtatacatttccttagactaaaaaaatatataaacccttgttgttaattataacattcaagtattcaactataacttcttaaataaaaaaattcgtcaactttattcataacatatatacgtgtccttgtcgacatgcaaaaagaatgtatat

SEQ ID NO: 29733 - DNA, 612 bp, Arabidopsis thaliana columbia
  unsure (1)..(612): unsure at all n locations
gagtagtgataaaaccattatgattgtactcgtagtttagcctttaaagatattgttttctttgagatatgtttcatttgtgcatatgaatctcttttgcttctgtcaaaatggattctgtctggccatggtttgcaagagttctctgctttccaggagctaacgtctcaaaacttgatcggaagaactttgtttaatactaatttcaaagtttccccaaatctcgttctgacgtgcattagttatgttttgactcttcgttttcctctccaaaagttgcgacttccgcgcttcccaataaagatgcagagcttggttggaacttgaaagaactttgtggtgacattaataatgcagagcttggttggaacttgaaagaactttgtggtgacattaaaagggtcgtattgtctcttcgttttcttctccaaaggtgcgacttttgttatccctttacgcctatataatggcggacgatctcccaagttttaaacatatacccattctctccttacctttgagagatgtcgacaccactgtagaaactggatatggtggtngcatcagagtgacagtggctaganatgacagagacattaccagtgaagtgag

SEQ ID NO: 29734 - DNA, 504 bp, Arabidopsis thaliana columbia
gatcccctgaaaataggaatacgtcgtatactgtaatttgtaagattttaatgtagctttttttggcactgatacttgattacttctaaaaactgaaagatcttgtaaaatgcagtttttttaatggaagagagaaataatggaacagtggataaaaaaaagccaaagacctttttgatttgaaatgatttagcttttaaattttgaaataagctgatggaaaatagttagaagtggataatttatctatctgtttatcacttaggttagatgaattggtcccaaaagttggagcacgcatgtatatagttggcatcattatcctttgctaataatataaaacttaagaagctaataaattaatattgacaaaaaagtctaaactaataataaaattcttctttttttttgatgaggttatttatcctatatggaaatgtatatgttattatttaaattctatacgtataatgcgttaatgatataaaaaattgagttattttg

SEQ ID NO: 29735 - DNA, 590 bp, Arabidopsis thaliana
tgtagtttcctgattcaggtgtggaattgctactccgttcctggttggacacggtttcatcaaaacgctgtctttcaacctgatcatctctcagctcaccctgcgcaaattctacttcgaaatctggctccagctgcagaattgagaaacaatttacaagctgaacttctatagatgattaaacaatggctagtcttatgatcaaatatctgttttgctcaattttcatatatggagaaaacaggatcattagtgctgcgggataacttccagaatgaacagacatgatcgaccaaaatgagacaatgattcagtgaaaggaaaggaaaaagcaaaagctagagtataaagctcacctcaaagacatctgagagttttgtctcaatgttggaggaaatcatgttgatctccagcctttcaagttcagcttcaagttctgcttcaattttacttatagattctgaattctctgctgtcttttcatcacactgtttttcaccatcgtgtatgtcatcttctaactcttttcccaaattctctgtctgctttgactctgctctgactttgtttagttcggtttggttagctac

SEQ ID NO: 29736 - DNA, 1073 bp, Arabidopsis thaliana columbia
tttctggatctacttcccaataccatcaccggaccggaccacttgatgatcttcctatttatgaacactactactagtaaactcatgtataaaatacgtactttatacgtgtatttctgaagattagtcacttcaaaaaatcatgagagtaataaatgttaaaaaaaaaaacagtggcgctcctttgccatatcactatcccaagtctgtaacacttcactgccacaaaaacaaaaaacaagtaatccaaaataaaataatgattttccaagtgtccttccttcgattaaaccgaggtcaccaaatctgtgtatgtaacaaaaattgtagtggaacatattgaatcagcagcgttactgtataattattttttgattatatcattacatcaacataaattatgatttcctatcattctgtgaaattactgttttcaattttgtgatttgtacttgaaaactaaacctaataaaagaaaataagttaggaatattttgttttttagttttgaaaagtggggctattttttgataaaatatcatcaactttaacaaaaatagataaaaaggttatagtatatattttttagttacaaaattgagattgagataaaaataaataaaatttaatggtcatcgataatattgagatttgaagtgtcgattggtatttgtatagtgttgtatctctctctctctctctctgtctgtttgtttcagagaaggatttttggcgtctccacgcacgatttaacgcatcgaagctctctgcacgcttcctgaaagagagagagaagagagagatcgcagatcgatttctcttaaatctctcgtgaatcccatttgccttctctctgctagattctctcttcttctcttcaccccatttctcgcttctccctttgttctctcatctgggttcttctcaaagcctcttcctttttatgccatggtgggtgcgtcttcctcttacgcatctccgttatgtacctggtttgttgctgcttgcatgtccgtctctcacggtggaggagatagccgtcaggctgttgctcttcaatctggtgggcggag

SEQ ID NO: 29737 - DNA, 1063 bp, Arabidopsis thaliana columbia
catcatcatcatctaccagaccttcttcatcactgtttaagtctttatcatcataattagtatcaccaccaagtacttgcttgtcacattccatattgcttggaccttcttctaactcagaaatcaagttcccctcatctccttccaccacaccctttcccttatcttccatcttttcaaaaagagaagaatacacaaatcaaaaactctctttggcctttactttcttcaaacttcactatctagaagaaaaatccgcctcctccgtaaatttcatcgtggctcttacccaatccaactataaaagagggaatcgaaatccctagtttgattttgcgatcatgattaccagaaggaattgttacctgagctgaaagacgaggtgctccccgaattggagttcttcaccgtgaaactcgtcggaaacgagagtagtcgcgacggtgttggagaatatttatacctgagctcaaaaatcattatgcagactccttttaggtttacgagatatatataactatatcaaataaaaaactaaaagggtttcgtggtgtagttggttatcacgtcagtctaacacactgaaggtctccggttcgaacccgggcgaagccattatgttttttcatatatgtaaaaaatattcgaaaattcctcacaaaaaaattcgccgttgccggggatcgaacccgggtcacccgcgtgacaggcgggaatacttaccactatactacaacgactgagttgctaacagggcaaggtacatctttaataaaccaattagttgaaattttgcaacagatagatatgtctaaaagtctgtctatacaaaaagacagtaatttttttaagaggattttgtatttctttttgtttgctaaatgttttttcttttaatatagatatactactatagaaacaaagaaggaaaacttaaagaaagttcattacgtttttcactatgattttttgtgatttgttatcttccccaactttgattatcaatattacttgagtgaaaaaaacaacaactcataccagttaagtatcccatattatacaa

SEQ ID NO: 29738 - DNA, 1288 bp, Arabidopsis thaliana columbia
ttctggaagtaagagaaatctcaatcccctccttctagcgccaaattgtgagagtcgaaactcgcacaagagaaattgtactaagggtttcttcaaagaatggatctttgtgagtttctcacagaacaacagcttgattaccgcggacggtgttcttggttatattattgaaataatgaggattcgatcgtacaagtgtttagaaatatgaaaataagtgttttgccttcaaaatcagggcgtatttgatagcctgaagttgagagcgtttttgtgcgtgtctttttctttgtcctcagaagttctttatatagggcgttatcagatcgcttctcgcgatattctcggaagatttctccttatcttagagctggcgaaggagatttgtctttatcttccgaagattctgggaactcctatatttggtgatatcctcggagattctctaatatctcttctgggtttttcggaaatggtatgttcgatctcatattggttaagtcatttcttgaaggttctgtcccgacctgatgttcctccgagccgggttgagttgaccctcaggttgtggttgagcggctcggaccttgttagtcaaatgatgcgctcccgaggcgtcttaagacccacctcgggatgactttccgggttgccatccgaggcgcttcaagaccgggtcggggaatcctttgtggtgatgctctgaggcgttcttgatgtcgcctcgagatggttccttgacatgatccccgaggtgttttgagtcccggctcaggatggttcttcgacaagatctccgaggcgttaatcagggtcggctcggttacctaggtggaatccgaccccaacagtttgccccccagctcattgtcttgacggaaagccgatgagtttcacggatgggttcccgagccgactgttcatcttcttagatctaactttgtcgcttcatcttcccggacggtcaaacttccgttgcgtgccgacgactatttttgagaagtggaaaacgtttctcgcttattcccgaggatcacgcgggtgtttccttctgtcgagcccacgcgcttaaacgcgttttaattgtttgttgcggacccgacgcgcctccaaaaactctatatatacgacgagccattccttcgggagttcatttgaagttttcgaagaaaataaacgaggtttgcttccttctctctgatcttgatatttctatcgttctttcttttccggtgaagctccgcgttcttttgttatttttgattttttcggtttagaaattcttgtt

SEQ ID NO: 29739 - DNA, 539 bp, Arabidopsis thaliana
tgattggcctttaaaggaaggtcccgacttatcacgatgagattagtttcaacatccctttcttttgtcttttgtgaggcttgatactgatagactaaatgttttggtatacgacacgtcatgtactagtgtcctttcatgtcgcatctgtggtaagtgctttcaatataccatttcttaacacggccaacatcattcacatgaagatttttgttggttttttctgtgttgaaatcattgtgatggaaacttcttccttttcctcgaccacgaccacaacctctcccatgaccactaccactaccacagcctcgccaaggtctggatcctcaccaattatcatcaccagatgtagcaacattcacttctaaaagtgaagctgatccaggtgggggagataaatgattcatcatcacgagttcattatttttctcagcaaccaaaaagacttgcatcaactcggaataacaagtgtgtcctttggcccaatattactggtgcaggattacaattccaggatgaaacgtggagagcgtttt

SEQ ID NO: 29740 - DNA, 608 bp, Arabidopsis thaliana columbia
catatccaaaacatcggtaactgtgacatcttctcctaagagctcaggtgaagaataaatgttcaaccttgcttccttgggaaaaaaactcttgcaaagactctctctggaagcccatggtccacgccgtcctcactttccgaatccttcgaagttgttgacatatctggccattagaataagagatggttcagagatttaattctcactaaaacaattttaccgacaccagtaaaaaaacatttggattgaacaccaacaaccttgaacgactttgaaacgacaaacattattcgggactaaaacaacaactcacatgttttgccaatatattctttcctccgttttgcaccactacgagttgtactaaaatcatcctccctgctagttgacgccataagaatctgggtttctctcaaacgtctctcttctcaaactggttctctctcgatttgttgtacacacagtcggctagggttcgtgataaacgaagaagagtacagtaaaacaatccaacaattaactcgggttcaataattgtctgaataaaatcgatatgtaacattcgggctcaataattgggacacttacacgaaatagagtaaatg

SEQ ID NO: 29741 - DNA, 486 bp, Arabidopsis thaliana
cagaaaatagagattatacatatggctataatatattacattgatttctcgttgtcatgatcaatcgagaaaatctgccatatcaagatgattatcatcatcttggcctttaaaggaaggttccaactcatcacagatgagattagtttcaacatccctttcttttgccttttatgaggtttgatacatatcggctaaatattttggtatatgacacgtctggtacgagtgtcttttcataccgcatctgtggcaagtgctttcaacatgccttttcttaacacgaccaacattatttttgttggttttttccgtgttgaaataattgggatggaaacttcttccttttcctcggccacgaccacgacctctcccacgaccacgaccacgacctcgacaaggtccgggtcctcgccaattatcatcaccggatgtaacaacattcacttctaaaagtggagttgaccaggtgggcgagataaatga

SEQ ID NO: 29742 - DNA, 497 bp, Arabidopsis thaliana columbia
tgttaaatttattttaattcatttttaataaattatatgcttgatattttcggggtatgagattataccttctccttaattgaatggttggctatgctcttcgaaatagcataaatggctcattaattgaatgattatttatttatatagataatcatggcaaatctagctaagcttgatgttgttgcccttgatgtatctggcaaaaattttatgacatgggcatcagatgctaagatgcatctaagatcaaatgggctttttagcaccatagatgcatttgaaacgacatcagatgagagcaaagctaaagccatggtatttctacaccaccatctgcacgacaatttaaaaaataaatacatcacgagagaagatcctgtggatctattgcaatcacttaaagatcgtttcgatcataaaaatatgtgattttgcctaaagccagacatgaatggctaaatctccggtttttggattacagaagtgttggtgat

SEQ ID NO: 29743 - DNA, 891 bp, Arabidopsis thaliana columbia
taaattatgttaaattcattttaattcatttataagaaattatatgcttgatattttcggagtatgaggttatacctcctccttaatcgaatggtaggctatgctattcgaaatgccataaatggctcattaattgaatgattatttatttatatagataatcatgtcaaatctagctaagctcgatgtcgttgcccttgatgtatctggtaaaaattatatgtcatgggcatcagatattaagatgcatcttagatcaaatgggcttctcagcaccatagatgcatctgaaacgacatcagatgagagcaaagctaaagccatggtatttctacgccaccatctccacgacaatttgaaaaatgaatacatcacgagagaagatcctgtggatctatggcaatcacttaaagatcgtttcgatcatcaaaaatatgtgattttgccaaaagccagacatgaatggctaaatctctggtttttggattacaaaagtgttggtgattataattccgccatgttcggaatcacctttaagatgatattatgtggtgaaaaagtgagggattatgatatgattgaaaagacgctctccaacttttatcctggaaatgtaatccttcaacaacaataccggaccaaaggatatactcgttattctgagttgatgcaagtcttttggttgctgagcaaaataattagctcttgatgatgattcatttatctcgcccacttggatcaactccacttttagaagtgaatgttgatacatctagtgatgataattggtgaggacacgggccttggctaggttgtggttgtagttgtgggaaaggtcgtggccgttgtcgtggccgagtaaaagaaagaagttctcatcccaatgatttg

SEQ ID NO: 29744 - DNA, 679 bp, Arabidopsis thaliana columbia
tgaagataaaagacttgaaaataactctaccaaattttgttacctttgacaatgatttgatatgacgaaactatttcctcccaaaccctaacgattctggtccttctccttccctctgttttcctcctttacaaaacgaaaagtggctaactataaccctaatttcgagtttccttcttttatatgcacactccagggttttcattaacccaaccgattaaaccgagcgatttaaatacaaacactaaccgttggccacgacctctcacacgaccacgaccacgacctcgcaaaagtctgggtccttgccaattatcatcaccggatgtagcaacattcacttctaaaattggagctgatccaggtgggagagataaatgattcatcatcacgagctcattattttgctcagcaaccgaaaggacttgcatcaactcagaataacgagtataccctttggcccggaatagttgttgaaagattacatttccaggatgaaaggcggagagcgttttttcaatcatatcatagttgctcactttttcaccacataatatcatcctgggggtgattccgaacatggtggaattataatcaccaacacttttgtaatccaaaaaccggagatttagccattcatgtttatcttttgacaaaattacatatttttgatgatcga

SEQ ID NO: 29745 - DNA, 315 bp, Arabidopsis thaliana columbia
gatctcctttatgatacccgactcggacgatgaaccggactaccttttgggtcacagggtcatcgggtcaaccgggttggaccacgggttaattagttaaaatttatttaataaatttaatattagtagaaattttagaatattttatatccacgaaaattcagttttataaatataaaacagaaataatcatatcatatttaatcaaatatgaaattatgttatgtttcacaggatatagcatcatttacacccagatatatatatatatatatatgcggggtggctataatagtatagtggttaacaatttga

SEQ ID NO: 29746 - DNA, 999 bp, Arabidopsis thaliana columbia
actctacaaatcgctttaagtaacacaactataatgtagcattactaagcgtcgctttcagtttcaggtgccctctgataatccaacatgctcggatctgcgtggtactgcccatacaaggcataaacggcagttgcaagcacactgacaacaacaaatcttatccatgcttcataatgcaactgcacagtagcggaaaaatcaaaggtagatcatatggtatgtgaaattagtataaagttagttcttagcgtgtacctgagcaaataagaagatgttgaagaaaatgcaaacggatggcacaatgggtacaccaggacagctaaacccagaacctagaggcagagcataagcctggaagcgaaaagctgaggggtttaacatgaagcatagctagcaaggcatttgcctgatttgtggagacaaccatgagggtatatttcctaattgatgttaacaaacttctcctctaaaccaagaatgcaaagacttcaatagtcacagactttcatagtatcactgtagagttctaagtgccagaacatgctagtggtggtctctattttatgctgtatcagtaaaagacttagtatctagcattttaacaggggtgaaacttggtttttttattttattttttttggcgctatgaaattaaggagaagtgtgctatggaattaaggcttatacttaaggctacttacttggcgataatgaagaactgctgaagcaacaactgccacaccaactgagaggagaataaatataactgaagcactgaaacggtaaaatacgccagcaccaaaaccactgcatgcaattataacaaggcaaatgacgccttcctgccaacttgatgtccatctattggacgactctctatcttttttatcattcagtctcaatgccacaacacaagccgcaacaactgaatacccagtctgaagaaatggaacaccgaaaatagtggtaaactggaaagtataagtatcaataaga

SEQ ID NO: 29747 - DNA, 476 bp, Arabidopsis thaliana columbia
cccgaggagcggtatgcgaacattttcaacgaataatggctcactatcatatatccgaattctatgttttcacgttaattataatatttacaagtttcttaatttatattatagctataatgatactagtatcttaaaaaatgttgagaaggcggtggtggatgatcgattaaaagtcaggtaggtcctagaacatggtcgttaaagattacacgtggtgaaataggtcgctgagtcactttttacgtcatcaaaacacgaccaaacgaaacgatcacgttctagcgtcttggctgttgcaaccgggaccgttactcagtagagtgttttatttcgattggttcgagtcttcaccaaataattcgttgtaataaatattgagttttcaagtttcataattttatatagacagaataaagaacaagaggtaaaaataaattaaggaaaaagacaacaatttacgcgagttagttaga

SEQ ID NO: 29748 - DNA, 555 bp, Arabidopsis thaliana columbia
gttaacattccaacagcttttgtgggtcccaaaaattactatctcctttttgtaaagcttcggattctgaaaacgttcaatggagatgtattggcgacggaatcaatacatttaatttttggaattgacgtctagggtttgtgattaaattgaattgggggttttgatttacaaaggtaaaattttggatttttttggagttacatcaatttctagttaagtgtggcgagttcgtgtctccttgtgccctcgattgtggaacccaaatggtgtacccggtgttctctactaccacttctttcctctaccaagagactatcttgtgctgtgctactcgttatgttggtagtgatgacaaacatatattattctatttttctatggttaaagaatattaaattttagattgaaatctttgggtcccaatatattatccacttagggtttagtatcctccaacaaaaacatttaattgattataatgctatattaacgtaacataaactactatctcatcaccactaccaacactattactttatatttaagacattt

SEQ ID NO: 29749 - DNA, 552 bp, Arabidopsis thaliana columbia
ttcatttggagagagcgaaactctcattgcttacccactgtcaaaccagggacgttcaccaagccacgagaaggatcaaaaaaggcatcaagagaggacgatgaaaaatcatcaaacatggatgcgaaagctggaggaagcaacggactgccctttgctatgtagattgctctcaattgcatacctagggagcacttatgcaagttaataatatctaaaaacagagggcagctaacttcggagcttttagcatagaaacaaaagatgataccatgagtaatgttttacacatcggagaagtagttcgcgaacagttattaaagcatgagtgaccaatacaccatttagctctacaaccatattttttatatgtggaacctacagaaaacgaagtaccagacaagcattagctcatataatatgatgtgcatgtgaatatacgcaaaacagcaaaattaagaagataaaatgaaatttctgatgcccataccgttaccacactatgcagtaatgacctcagagtttcttgagctgagttatagctcgaatatg

SEQ ID NO: 29750 - DNA, 1288 bp, Arabidopsis thaliana columbia
gtatcagtaacctataaattagaatttgaagagcttatattaattatttaataaacacatgacaaatgctaaaatgatgatgtggcaattatattgaggagacaattgaccaacttttgtatatatatatatactagataaggcccgcctatttaggcgggtataagatacaaaaataaatttttatcgatagtatttgaatattgtatagcaatctatatatttttttgatatttaatttaataattattggtttaaacaaaatttcagtcttatgcattctattttaattatatacactcaatcttatcaatgatatttgaattctaaaaagtaaccgaccattattctatatttaatttagtatctagaaaagaaaaagaaaaaataaatttctatcttacaccattcaattttgtaatacaatttaactatctatgtcatcataataaactcgatttaaattctacacacttcatattgagtgataacattttcatatcaatataatatttatgacatatcaaatttatatcctagttagtattaaaaataattaacaattaacaaaacataaataaataaataataaagaaatccacaaaaatatttagaaaccaaacattgttgaaaatatattttttgtatatgccgtaatctcgtaagttgattttacatcatgcaaattaatattaaatgagttaaaattaataaatgaaagtattctcattattaagtaactgaaaaggttaaatcttattttttctcaaaatattatattttcacttatgattacatgagttaaaaaatttagaataaaacataggtatagtaacacatcaaaggatgtaagacgctccatcgtacgatgcgttaaaattcttaggttaaaacataggtattcaaaaatttattcttataattaatattttgtgttttgatttaacgaatgaaaacattatattacattgacaaatataattttatccaactaaactaatgttaaataaattacgtctccttgttaaacttcaatggtctttttaattagtattattatccatactaaattatttaaaaaaaaaaataatatgtgctacatttaaatgatcaataatacatgtaaaaacaaatttgttaattttccttttgttgaataaaacttagatatatatataattatatatagagacatataaattagtatatgtaaatttgtttacttttttagattttctatttttttaagagaataaaaaagttaaatttttaatgacacatgtaaaca

SEQ ID NO: 29751 - DNA, 870 bp, Arabidopsis thaliana columbia
tgaacttatggataccctaaaatacttggattatcttactcatttaaccactcttgttaatccaagtagctgactctccttattagagcagttaaacccgaacccaaacctaaactttctttcaagccttatatcacttgtgagtgtttgggaggtcttattccgattaagcttggtagaaagttttaggttcgtaacgactagataggactagataggagtaggtgggcgcttatattgtggattgggttgtgtctaaaagaaacaaaaaaacggtggattcattgataagaaaaggtcaaagactctaggtgaagtagggtaaagaagcagaaaaaatctagtaaagattttgggatttgtaaagaaaagaaaagggttcttattagctaatgaagaagggcaaaagcccttggttttaaaaatttaaaacaggaaccttagttgttaaagaaatccaaatccgctagatgtatcaaagtgttgagaaagcttctcctagagttaagagaaaagaaaagaatgattggaaaaagggtttagaagatttatcaatgcaaagggtagagttaagttcttaatttgggactggagatgggattaccattagagcttcattggttatactctgggtagatgggatcttatctctggatgcatagcttgggacttacctttagcattctactaaagcttaatcattttttgagagatcccctgttactaaagcctattctgcaagggaccatctttgtctcttgacctataccttagccaaatgagttaattgatgatgcattccttgattcacgttccagaactaatgaatgttaaagggattggtagatttgaaaacacctatcctctaga

SEQ ID NO: 29752 - DNA, 561 bp, Arabidopsis thaliana columbia
ccaccactatgtctcacacagacgccataaacgaacaaaaacgtgagatcctctcctcccaaagcttccccgaaatatccaacagaaacagaaaccgatgatcttcaaagtctcgagccaagcgtaattttgagctggtgtttttttctcgcgaaatcgagagagaacaaaacaagaaaacagtgggggtgtgttttttagatgaagtgtctcgggagaagagaagagacagacaaatcaaagaaaggaagaaaaaaaacttcaccgtctttgtgaaaattttaaccacaaaagacggcgaaactatgccgttttagttaccgccggagatcgtgaaggttggtaagatacgacgtcgtttcaagtgtaaattttttaaagagaggactgactgtgctttttctgtaacagtggtcatctgagaaaacaaggactctggctaaaatccactatatccacgcgcctttaaagcccgtgtagtattaaagaggctggaaattaggaggcgcgtgtagtaaacgcgattctctcgagagtattaatagagaggggagagtggga

SEQ ID NO: 29753 - DNA, 560 bp, Arabidopsis thaliana columbia
gagcaaaagttcatgggcattacagcgaaagaagcattgatggtgaacccagtagcgagacttctgatcaaaccagcatggtgttactactgtaaagtcacgaaacataaaacttaagtcaaaacaagaattgcacaactcataaggacttaagtttttagtcctatgagtccatgaaaagtagaaccataaaatatgtactttcctttgactaaaagtgagaaaagtgtctaatgcttctgagttctaaaattcgttatcaactcttttaaagttttttcctcagatttcgttcctgttttttctttccccaagtctaataaaataccacttattcacatcaataatgttaggttattgatgtattaggcgatttgtgtagtttaatcaaagaaaacgtagaacaacagacttctttatctattttgttcagttctctttggcttgctcaatctatcttcaactttagcatatgaagtattgaatgcacgactaatatatagcatgaaaaaatgcagcatcggctcttcataacacacatgttaaacttgcacgtgaaa

SEQ ID NO: 29754 - DNA, 488 bp, Arabidopsis thaliana columbia
tgacttacacacgtgtcattttaccgttggggtttggtagagtaatttggttgttaaaaaagagtctatggtccaatctcattatgtggtttatgtgttcgaagaaaaattggcaggtcggcaatctgcatttacggggtgtgttcccacgtggaaacaaaatttatagtatatttcctggttatatcgatgcttatttacatactcggtgtctgtgtttaaatttcttatatcaaatttccacaacatttcaatttattatcgttttgtagaaaaacttctatgtattattatattgctgagcaatcaatattggatcttgtggaagaaacttagaagaccagaaagtgaaggcgactgtaaatatgaaacaaaattttcgcaaaaaaaacattggagattgactctaattagtaatcgttagaggttaatagtttaaaaacgatagttaaaaaagttttgtacttttgggatacgtatacttttct

SEQ ID NO: 29755 - DNA, 474 bp, Arabidopsis thaliana columbia
gaaatattcgtacaaaaataatcggcattctaagtggttgtcttgttagtatgtgtccatttttagtacataatccttgaacctaaacaactttattctgtttatttacgggtgtaactgtgagattcagcttcttactattgctttgtaggatcaaccagagcgtgctgtccgagttttggctagaatgaaagagctaaaactgcgtccagatatgaggacctatgaactgctcttttccttatttggtaatgtaaatgcaccatatgaagagggcaacatgttgtcccaagtagactgttgtaaaaggattaacgctatagaaatggacatgatgagaaatggttttcagcacagtcctatctcaaggctgaatgtggttagtttctgctccatatagataggtcttgacgtgttttaagcagattaatcaaatgtagtattaatctggacaacccttttaaggcgatacta

SEQ ID NO: 29756 - DNA, 434 bp, Arabidopsis thaliana columbia
tcgtctttttattaacggaaatttatcgatatgcctataatgattcaatcaacgaaatttactattttattataaagtcaaaccaaaatttaagattttattaacattttgaaaattcatgtttttatgtcccaaatttgaaagtttgcaaaaaaattttgacatttttcccgatctaaatttaccatttaaacaataaaaagtaaaaggtcaaaatgtaacattttagaaacacaaaggacaaaatgataaatatcatgccaacgcgttgatcggtttttagctcttttcttccgatttcgttttttctttcttcatctctaagattaagcacaccttggcatccattttcgtttgaatctcaacgttttttgcttgattttagcttctgagagagtccagatccaaggaattggaggaagaataatgtcggc

SEQ ID NO: 29757 - DNA, 586 bp, Arabidopsis thaliana columbia
tcacatcaccaccagattctttcttgctcttcttcttcttcctcttcacaccatcatgagcttcagaatcaacctttgtctccttacttttctccttggatttcttctccacaccatcatcctcagcttcggaatcagcctttgtctccttacttctctttttcgatttcttcttcacagcatcaacagcttcagaatcaatccttattggcttcttcgacttcttcttcttcttaactataaaaacctcatcacctagtttctcactttcacgcccagttatctccatatcttctccagtaaaaccatccttattctctcgcttattcttcttcctcttcttttccttatccttcatagaactgtgctcggaaatgaattcttcaccggtttcttcagaatcaaccttagcgtcactctttttcttcttattcttcttctcctcagccatctcatataccggcggacacggttacgaaaccctaatcacaaaaacctgcgcgactttcgctcaaatctaaatccgaatttcgattgagtgattttaaacacagcgatgctgagattgattgtgaaggagttttgg

SEQ ID NO: 29758 - DNA, 537 bp, Arabidopsis thaliana columbia
ccaatgtgcacggccgtcagatcacgacagtacattagagtcaggcacgaagaatagctccaggagaatgcgtaacctcgtctggctcacatcctaaacgtagagttacgctactcacaaacacatacgaacgtgtgttacttcctggtcaaaatgaaatttgtgtgataatccggccctgtcggcaacgtatgaactcgctgaatagatcagtgtagcgcgccttgggacagaacatcttggggcatcagtgacctgttattgcgtcagacttccttggcctaaatggtcatagtccctctaagaagccggccgtgaagggatgcctccacgtagctagttagcaggctgaggtctcgttcgttaacggaattatccagacaaatcgctccaccaactaagaacggccatgcaccaccacccatagaatcaggaaagagctctcagtctgtcaatccttactatgtctggacctggtaagtttcccgtgttgagtaaattaagctgacgcgcactcctggtggtgccttccgcaat

SEQ ID NO: 29759 - DNA, 738 bp, Arabidopsis thaliana columbia
atattatttgtttatgtttatagtaataaagtcaataacctttggctgagactaatacgcaggaaacgaaaaaaaagctggacgtgcatatcatgactcagtgtagctaccttaagccaccaaacgtgcggtccatgcttactctctgtggctctgtataagtattcatcttctctttagcactaagacttagccatttgtcaatttctcttcttacagatcgagatttcaggtcggaaaataaaatggtggctgcagtacttatgccaactattagtttcagagacgaaagtgctcgcgaggattggcaagttctaagcagaaacgattcaaagaagaagattctagtcaagcaaacgagtatgatgcaatccgagagagagatatcgatggatccgaaatcaatcaggtcgttgtctatgtcgggttcgttgagaaggaacgatagcttcgatatggttcgtttaccggcaatgtcacctcctagagacttagattcgcctatgcctcttcctttgcagccagtgcagactactggttctcctaaacaacgttcaggtctcatgcgggcgctcagaaacagggaacaagacagcctcccaaactctcctaaacaacgttcaggtctcatgcgggcgttcagaaacaaggaccaagacagccttccaaactcaaccactggttctcctaaacaacgttcaggtctcatgcgggccgctcagaacaaggaacaagaca

SEQ ID NO: 29760 - DNA, 571 bp, Arabidopsis thaliana columbia
caacagcagcaacaagataaagttacgaatttttcctcttttgtaacctttgtttctcttcttcctcttcctccatttttttccattaaagattctgcctttgggttccaatttcgtctttcctttttcgattttgccgcgtttaacatgacattcgcaaaaccctacacttttctggacgccattgttgaatcccacgaatttcgtttccctagagattgcttgttctagccccagcttgaagctaaagatttttcaaggaaagcacgtttttttgtttgtgcaatcgaatctgtttttctgcgttatgggttgtgttcaatgcaaatgttgtagccgatatccttcgtcatcatcagatggagattctcgtggacctttagaagccaatggtgttcttaaggggaaagatcagaaacctcttggatctattcacgttccttctcctaattgcgatatggtgtctctgtgccatccaacgaggctattacctgactccctgataggagaacaagacactactgcacaaacagagctcaaggtaccgaatgtcatttcttcgggctttgat

SEQ ID NO: 29761 - DNA, 539 bp, Arabidopsis thaliana columbia
tctcgattttaatatccacttatcatgagtaagataccagtaattacttgatgtaatgaattagagatgaaaaaaagtcgtggtaacaaaatatcccctactgttcctgcagacaataaatgaagattacctgcttgtcctagtatataagggaaactagattttccctctcgccaaatctttaagctcagtgtactaagggctagaaggccaccaccatagaggacaccagtacttaaacttgtaagatttcgtgaaaacgcaaaaccaagaagccctccactcacaacgagaccacctgaaaaagtatcatttattaacaccagcgtgttacctgacaataagcaactctttgctagaaatgctaagatttgaaagaaagtttgagagtcacaaagtagtaccataaggaatgccgaaacagaagtcgtggatctttgctgctcttattggttgtgtggaacatcttcctctactggctctgtgatgctctctttattgggtagcagtttcatcaacagtggaatacggtttggatg

SEQ ID NO: 29762 - DNA, 322 bp, Arabidopsis thaliana columbia
tgttccatcatgcccctcacatattgtgagtcgagtctacgaaacaatggccaaaaaaaaaaaaaaaaacatgaggcacaaagcaaaagacaatcatgaaggcatcatcatgagactatccgaaaagaagcaatccattacagacaccatttccacttaagttcaccactgtcatagctcaaaaaacggaggtgcaagtcctaagatcccatcttgaagccaatagacaagttattatgttgttagccatagaatcgtgccaaaaatagaaactttgccttatttgacccatacagaaatcccaagagtcaccaggcaagag

SEQ ID NO: 29763 - DNA, 669 bp, Arabidopsis thaliana columbia
ttatactgagttaaagtgactaatagttttaaagtgttctattgtggccaaagttttgaaatattgcctctacgtgtaatattctcataaattattttcaatggaagaaatccaaaccctaaggatactatctaaaaaatcctttgatctaatcttagacactgctcgaatcaattaatctctaattcatcactaattttaaatcaaatttgttcattattgtcgaaattcatcatcgtcgtcaccaactaataacagaggatttggaagagtaattctaaaccaaatttgttcgcgatgtttggacgacgatgctagcagaggatctggagacccaaactaccacccttgcttctcacgcttaattcaccatcatcgctgaaattcaccatcgccgccaacgctaatcggaagtcaagatcttgccgtctttttcatcacaagacatgattcatgagtcaccatcgccgccaacgctaatcggaagtcaagatcttgccgtctttttcatcacaagacatgattcatgagtcactgcccttgcttctcacagtcttcaaaatttttgtcattgcacgagctcaatcatcgccgtcatttgtaaacaaattcttaaaaaaagaagaaggaatgaaaaattagtcttttagagagataaaatactcattt

SEQ ID NO: 29764 - DNA, 1191 bp, Arabidopsis thaliana columbia
cagtatagttgataacttgacatcgtcatagatttggaaaatgggcatactttacacttgattgtgaggcagccagcagaatcagctccttcctctggtacaccttcacaaggggcaactgcaaatgatggtaatcaagttattttttatcccctttctgagtttttaaaagagctgttaacacaaccatcatcttatttcaacttgttatttaattcaacaggaaataatacaaatggtggaccatctcgaaatggaagacatgtctcccacagcgtagttcttgggtcttttaatgttggagatcagacagaaggcattgttccagacctcagccgggtaatccccaaggatttgtgatattgtttggcctatgggatggtttgattagttaggctaacctgcttttaattttgtgttgctaactactaaggtcattggagcagttctaaattcttttggagttagtggacagcttcctacaaatcacagtactaatggcacgcaatcctctatgcccgtgagtttttttctcgtcactctctatttcgaatttattccatattagtgcttagtctacattaaggattgttgagaatcaggtgttgttactatttgatgtgtaaggtttcatattgtcatcaactattgcctgtttctaaactcgatgttgcatgcgcttttatttttcctagtcgaatcagtcgtctaatgcacctcctggaaatacatctgatggagagcctggcattggtggtcaaagccaagctacgggtcattcacaacctaggcaagcatttcctggtgtatcatttcaaacatcgatgcctcgtgtagttcagattcctgttacagcagccacaacgattcctatcccttcattcttaacggtagttcttagtcacgtagtagtattttgatcttgagactagagctttaatcttgtcattttacaatgtaactctctaattctgcagcctattccggattccttagacactctaatggagttcattaatcggatggagcaggcattatcacaaaatggtattgtgatctaagttttattgtcatattggatagagaacacataaataagttaattggatgtcctccaggctatcagccagatacctcttctgctggatccggaggcgaccaagggaagagttgcctagaaatagacgaggt

SEQ ID NO: 29765 - DNA, 980 bp, Arabidopsis thaliana columbia
tagtaaacgacattatgtttagctgatttgtttttctctcatgtgtaataatgaaagcaaaaaaggcttcttgaaaagattcgtgtgaagatttatttgtctggtcaaagtcactaaatattacattggaatgttaaatcccaaactgaagtagaaagcttaaaacaaaaagcgcaagacataatcatactctgagacatgtccaaatattatactacactattgcagaataaaaaactaatgatcaaatactaaaaggattcgaagtcatatgctaactaatgtattggctacaaataccacttaatttgaatctataactaacccacggtgtagtaaatacttggttactctactaatgtacatatttgttattataactaacaaaaaatcaaaactaacgaattggtatttgatgtggcatttgatgtctcatgttgttaagagtgttttgatataacctacctgtccaagttctgaatcctgaaccacagtgccgttgcagcaaaatccctaaaaagaaaacggatctgaaacaagcaagagcaaatggagaagagaaaccattagattcccatagaccaaccaaagatctgaaacaagcaagagcaaactattgtgattgatagacgtgagcttagagaccaaccaaagatctgaaacaagcaagagcaatccttaaatccttcaagccaaatctggatcctagctttctgcatcaaaaacacaaagcaacacaaagcaatataagcaaaacaaagccgtaaactaaagctaatcgaagaatcaaaagcaagcaaagcaacacaaagccataaactaaagctaatcgaagaatcaaagtagccacggagtaaagcagagcgaacccacaaacaaacaatgtaaccaaggaggatcaaccctagaacaagtgattgcacaaggatcgaagagaacgatgagagagaggagcgagagagaggagcgagagagagaga

SEQ ID NO: 29766 - DNA, 868 bp, Arabidopsis thaliana columbia
ctgagtagtcttcttcagagttcttgaggatgggttaggtttaggtggattcctcttttctttagctaactaagtgtttatatgcatgattcccttctgttttaggagttcttaatgctattttctttctgatcaattgaaaattgatttcagactttctccacctaacaagtgttttatgaaatgtctaaaccaactaatttcagagatttgtagattctagcccaagaccttggatgtttagactgcttattgactttaatagattggtgtttaaagcctgctttattatgtttcatcaatgaaaattgagattaggaagttataaagttatgagaatcattgtcacgaaagtggattgatttggtcttgaatctattgtctagggatagcttgattgattttgttagttagctaatggattgaggagtccactaagaccaattacctcattcttaagagctctgttttgttttattgtgcaaaactcgtgtttttagtactctgttcgtctcgtgcaaaattggtgtttttagtattgtactcgacctgttggtagtttactcgactgagtgcttctctttgtgcttggtttactctctggttcttgcatttacttcttggttttatcactcatgttctttatcttctgcttagtatagttcaatttctaaatttgatttacatgttaatctgttgcttaggtttagtagaaacacaccaaacctattcacacttcgcttgacttagtattctctaatcatatcatgattgatagcaattacacccatttggattgacaccttaaatgctgcaatgacataagatgcatttagggaattgacacagaaaacccttgtatcaattt

SEQ ID NO: 29767 - DNA, 376 bp, Arabidopsis thaliana columbia
gaaaaagacgaaagagacctcatcatctctatacgagagaacgtgttaccctaatgggtatatataatacgccaacctatgcaagaaaatcatatcatcacactgatatctttcaaaacaccttgagctcagtcaaaacacctgtagtgcatacaaaacacccttagctcttgcaacaccagtagtattacaagatgatgagcaatttgcagaatgttgcacagcatgctcacgcgaacgacggtaaatgtcagtaagatttagacagatcaagttatgtaattctcgaatcttccctcttcttcgtatgtctcacaaccattagcagtattttcaagatctcgtgcaacgtattcaaacttctagagacaattgg

SEQ ID NO: 29768 - DNA, 274 bp, Arabidopsis thaliana columbia
gatgaaggaacttttcaggtcgatcggtagtcggttttatcgggtcggtcgatagtcggttttatcgggtcagtcttctagttctattttgccactgaaaacatggatacattctcaagacctccgttcatatatcgcgtacaagcataaatagtacaggaacatgagagacctgactaaaccctacataacgttgtaccagtagccttaagctgagcttgttagttcaagctactagtacagagagaccgcctattagagaccagtatagaag

SEQ ID NO: 29769 - DNA, 461 bp, Arabidopsis thaliana columbia
cgttcgtctgtccacttatttacacggtattggatcgtgatgaaaaattaaggaatggaagtagaagaagagttttcaaggaatggtttatgtttgtttgtgtttgagttttactcaagtcttgtttgtgtttgatgttttatgacccaaacagataattcttcttcttcttcccctatggttttatggaatatagattcctgatcttaataattttattggtttaaaaatgagtccatctcttcaactttttatttaagttgcacaaagtaattagtacttaacattgtttaaactttgttctgttttcctctacttcttctcttgtctcttacaattgctaaacaatggtttcctcaacacaaatgaaattctaattaataggcaaaaagatgctcgaatgagacgagttcaatgtttcagtcaacctagatataattactctctattgggaagaaaca

SEQ ID NO: 29770 - DNA, 601 bp, Arabidopsis thaliana columbia
gagatctttgtttgtcaacaatattgaaaaagaaacaatatttaataataatgtacttagttgttggatttggaattggcttagcatgaaaatctctcatcacatgcgattgcctcatacttcccacaaaggaacaaccatatgcttaacttctatgtcatgacaaaaatacccctcacttctttgatgggatgtatgagtcgacaccctttactcaatgggtatttccgtcttctctgatttgtttactactaccatattctatattgattatttttttatttttttataaagagatccaaacattttcgttttgcttagcttcatcttatatacaatctcttattaaatcaagatttttttctgtattagttgttttatttccgaattagaattgaacgttttatatcaattttgttcaacaaatatttgttttaattacaaataaatttcaaaaactatgcacatataacataaacgttgtgtatttgctggcttctatactttatttaattattattgatgaatatcagctgaggtttgtctttatttgcttaaatatgtgtaagataaaatattaaatctcctctattatatggat

SEQ ID NO: 29771 - DNA, 383 bp, Arabidopsis thaliana columbia
catgttactgtttttatctctttctgcattgttatctgctatagttgcaaaaattcgatcatacatcaaataatattgtgtggtcttattcatctaaactcataattcccacaaccgtacggtacaactacaagcccaacgctccctgaaacagggccgtgtacgtctttaaacatttaaaaccttaaatttgtacctgtgtttgattcttcaagaaacagagccattagatgtatcatcggctcatccaatcatactcgttgtctccctgcacaccaaagcaacaacttgtgtaaagatttgaacccaatgttggggttttaagaggatcaaaagaggtactcaaaggattgttaaacgtgcctgaccattgcttcgaggac

SEQ ID NO: 29772 - DNA, 536 bp, Arabidopsis thaliana columbia
caaaataaacctttgcaaaataaatattacactgtaccattgtatacattgttaattctttcaaacaaagtattagtgtttacacgtcaaacacactttgaaaactacaacattcattttgttttgttaaagtattttctgcatgcaaacgcaatttccaaacaagatttttttggcctgtctacgtatactattcctaaaaacatcttatgaaaaacctaaaaaaaggttttaatatttttatgtgagcgcatatgctaaatataaacatagataaattacacacaaaaccaaaatggcaaaggcaaagaatccatcaaaccctgtagtttatatacttagtgtcgaccttttagcacgactagaaagttccatttctagtggggtggattcgattatttagccttttatatatacagtttcattgatcctttctggtttattaaagtttttttttccgaatatttatagtggtgaagataagaaaaaagaatttgactgaggaatgaataaaatagttgggtcttttgttggat

SEQ ID NO: 29773 - DNA, 497 bp, Arabidopsis thaliana columbia
gacaccccctttttcatttttgcttatcatcattcagtctaataactagttgatgatatataggggtaaagtaatgactaataagtcatgaatgtgtttgagtattatacgcacttttgaaaccggccaagtccacgacttcccacgaccagaaaatctggtcgaactcgcttcacttcttggcatatgacatccttgggatcacctgtcttaatccaggcctcgcaaccaacctacaagttttgcacagctagaatttaatcataaaacatcacaaagttacagtagttgcaatgagatacaaaacaaagaagttcatagacacagcggaggataacttgatttgagctaaaaagagagagtgtgtttaccccaatctcatgacatttattaacgaaaaactcgagaaggtgaagaccttttgccttgttagattgtctcatgtctcggaaatcctcaggggaagcataaatgctatccacgtcatcaaaacctgg

SEQ ID NO: 29774 - DNA, 473 bp, Arabidopsis thaliana columbia
cagaagctataaaatagatttgctgatgaaggagttagctttttataatcttctgtgtttgtgttttactgtctgtgtcattggaagagactatgtcctgcctatataatctctatgtgcctatctagattttctatacaattgatatttgatagaagtagaaagtaagacttaaggtcttttgattagacttgtgcccatctacatgattcttattggactaatcattctttgtgtgaaaatagaatactttgtctgaacatgagagaatggttcataatacgtgtgaagtatgggattagttcaacaatttcgctaatggagaagcaaaccaagggttaaacgtttatagggttaagctaatgctctgctctttatatgttattggaacagactattgatgtgcctatcttggttagttgcagattctatctcgactgttataagtatgactgaaggcctgatgacttatg

SEQ ID NO: 29775 - DNA, 576 bp, Arabidopsis thaliana columbia
acagataacaatagaaatatcttaagtaagacattgccacattagtcacatgggtaatgtttgggactaatttagacttctagccttaattacaaaatttaaaataataaaagagaaagatcattattcattggattgcaaaagccgattggactcaaacaaggaaaaaagctaagaaaagggatttgggacccgttggggttggaaaagaagagagaacacgtgcatctctctgacatacgttgaaacccaaacacttgcctccattttcttctttcgaatttatgatttttgtaatctcatgactatttccatcaatttccatctatttccatcaatttatcatattcaatagtatcaatacagtataatgccaatatcttcactccttgaactttcattgaccattgttgtataatatattgcattccgttaattaagttatgtataatttgtatctattagtgaattactcatccatttgttttttacactaattcgcatccatttagatgacataattaggtttctaacaataaacaccaaaaagataataataaacataaaaaggttttg

SEQ ID NO: 29776 - DNA, 1599 bp, Arabidopsis thaliana columbia
aagagcttaagcttctgtaggagcatgtcgtttgttccaaaaggtggtttcttgcttccaatccaatctctaccaagaagtccggctctgtcgctgttgagcatttcatcgcggaatgtggatagaatctggtatactgatatcctcaaaacatctgtcgctgcatatgcgtaggcgtacattgcgccaatactccttttgatgggtttaacgtcttttctgaccatactcgaggtcgcccatttgatactagcaggtcccatcagttgttgaggtgattgaagattagtcttcttccccataaacgtttcgatagctagcaaaagcgatagaagtgttgagacaacatcagcgtttccaccagacagttgagctactccgagcctgtcttccttgtgagagattgaagtcagggatgcagatgtttgagcacaccatgcatatagctgcaaatatcggatacagagcaaacagattttggttacagctacatgaagaaattatcacatagaaaagggatcaaaatttgaatttcgttttacctggaaagacttaagtgattcgccgaattttggatcaataaaggactcggttggtggctggagtggtgtctgataacctttttcagtaaaggtgtggtctagcccagaagctaacttggaggcaagctcttccaaaggcctcaagcatagagtaattactcttttgtacgtctcggtggactcctcaaagaaggcagcacgacgccatgtgtcaacattattctgagacaccatgtagagatcaaggtatgcaagagactgctcgagggaacctggagcgctcccttctaaagcagcaagaagaggctcgcttggattcgtttctgctgcagcagatccttttggaggagcaaagctgaaccgttttgtgtgcagaacctggatatgaaaacaacaattataactaacttcttttgtatctagaacctggaaaagtagctgaagtttatggatgtaacaagtaatacacagagcaaactcaccgatgaatacttaaagttgtttaggtaggaatagagttaagttattcaagaaaagtaaacatatcgatacaaatttatatgagtcttctttgaactgatccacatacacagaagacagacagaccttggtataggcttccaaaacataaatagtaaagacagaaatgactaacaaaacaggaaaacaattctacacatactatcaatgcaacatttgattgcaaacacagctaacttgtcgtcttttcaaatttttctcagttaagttttgcatcactcaagtaatactgagtgctaacctcaactatgttcactaataagctacagggatcttaaaatactaaacactataccaccaatctaaacggctatacgaccaaccaattacatctatcaatagcaaatcaacagagaaaacttaactaaccttatgtatatggtgagtgacttcccaagagagaatcaaacagaaactgccggcataagataagacctgctcacccaaaaatttcgatacagacacaagcccacctgaccagtctagcagaaacaatagcattatcgtcgacaacaca

SEQ ID NO: 29777 - DNA, 796 bp, Arabidopsis thaliana columbia
gcaaatatgtgaaatgcctttaggagttgcaataagtttccaacagatgtgaacctgtaaaataaaaaatcacaccaacaaacctcatgtaagccaccttaaaaccaaaaagattaagtttttacgaactttacagaacaagggacatcaagaaagataatagttcacaagacatggttactaagctactaagtacatgtttggcacaaaaattcagacctcaagctaaagttgagttctttaagaaaaagggtaaatttaaaattgtttataaccagattgaagttaaggaaactcagttatccaagtgtgtgtctacattttaataacaaacccagaaatcaaaaattaagttggtatttcaatcaatgactcaatttcgaggaatttgttgtactcaacggacacaaaactttgagaactggtaaattcgatcaagaaattaattatacttctcagcaacaattaatgtgggaatcaagcaatatctaaggtgaaagagaagaaacgtagagattgcagaaaccaattgacggaaaaattagatcaagacggaaaagaagagaagcggagtgtgtcacctgagaaaccctaacgacggaggagagacagtggtggaaacggagaattgggatctaggtttcagtcgcgacgttggatcctctgtcgcatatcagtctctccgactaaaggaccaaacgtttctataatattgaaactattaattaattacagtgtatcgtaattaaacggatacatattgtaatgcgagtcaaacgacaacatatttaagacg

SEQ ID NO: 29778 - DNA, 553 bp, Arabidopsis thaliana columbia
gatacgtcgcaaggacatcccatgtacatacctccgggtaacagagtcatttggtatccttccgcgaatgtaaccaagtctttcgacattttcccttcccagtgcacatttgttgttacttttttctcatccgatgtcgacgaaatatcctgattcacatcgagttcagaggcattctcatataaacagaagttaataaaaggctatgtgggattgttgaacagtattatatacctggactacttgacctttgtcattcatttcaagaacagcaacagtatcggcttctgatagtgttgctccatagacaccgcttcgttttgttaccgaacgacctttccaagtaccgagaaatgggtttatcctttctgcatcgttctgtaacaaaggggaacatatattggtatggcagtaaaatgctttatgagcatgaatcaataacaacaaactacctgagcgttatcgaggactggatgagcgagattctctaaccctctttcctcgaggaaaacaataagcatttcaagaacacctttaggatccatgatgtgaa

SEQ ID NO: 29779 - DNA, 533 bp, Arabidopsis thaliana columbia
aagtagtgaaactgtatatttttatctttgaatcaggattacaatcaacaaccctaacaatcctctaggctatggctaaaagttcctcactaacaaagtaaccatatggtcaaagtctgtttctgtttctctctaatctctatttctagtctatcagatctgtgttagaaacaagtgttcacgatataacattcaaccaaagataaaaggtcatgactcatgacctctgtcaatcaaaactgcatttctaagaaccaaaaagttgcagatatcttcttccaatcagtttcaccatatgattcataaaagaagatcaaaagaactgcaattcctagttaatgtaaaccattgatcactaaatcaccgagaaagaatcgagattttgatgataaaaatcagacttcataactacatgttccctatccaatgatgtaaaacaacaaacaacaaagctatctcagaaacttctaaacaagtgaaaatcgatcaaaattgctgcaatcaaacagttaagatcatgtagcagagatagc

SEQ ID NO: 29780 - DNA, 557 bp, Arabidopsis thaliana columbia
gttggtgacataagaaaatggcaagattttatgtagcagtagtccaagacctacttgatatcaacaaatttattttatttacgttaatatttcctatataatgtttgaataaattattttgaatcttataaaataataaatttatagtttttcatttattctgttcaagataaatacgtaattccactcttcattatattcaacgttattggatatccaaatatccaaaacggatcatacatatcagcattttgtgggaattttaatctggtcctactaacttaagatattttgtcgactagatacgttaaacattagaaaattattaaaagaatgacctctaaatcaaaaccacctgtcatcagaaacagtgactcacatcattatttgtaataaacaaactttcatcttttgtttttatttttcttgcaaaacaaaacaaagattctcctaataatttcggaaccaaaagacccaaaactagaaaacagagaagaagaagaagaagaagaagagagcaaaaattggtgatgtcagcttcccgatggacgttgatg

SEQ ID NO: 29781 - DNA, 578 bp, Arabidopsis thaliana columbia
tacttactccttcgtctctctcatgtcaaaagttgcgatttcaatcctgactgattttgtattgaattaagattatagacactgtaaacgttacgaaatgttcttctcttttgttttgttgttctgcagctggactttggtttcttgtcctaaaaagtagagttcatgtattttttaattcagaaaaaacgtgaatgttgtttttgatgccaatgtaatgctgaagagagtgtatgctgctagattttgagttcatttgttgaggaagtttgtgtttcggaaatttgctgaagttggtttttggcatgtcttgtcagctcaaaactgaaatgtaagctaacgggcgatacggtaaacaagactgaggaacatatttggaagcatatcactggacgtcgctatttcgtgagattaggtatctactttgaagcttgattagagttggttagcttgcaaaaatcttttgcgcaagaagttctttttttatttacataagttcaatggttacattgttacttatgtgacagaggagaaggaacgagagaaagagtctggatctattccagcggaaggtggag

SEQ ID NO: 29782 - DNA, 876 bp, Arabidopsis thaliana columbia
gttaatgaatcttttactgctaatgctactctctattttgttacttgaaacctttttctactttttacacggatacgaatacgtgatatgtctataatttgcatgttttcagtgttcattcattatcattttgagtctagtttcatatcattcatcactgttttatatcatttcttatcattcttgcatactttgcatgattaggatagctttgcctatatattgcatttttgagtttttttcaggtgatttggagctgtttgcgagcaaattggaagaagcgagccagaaccaaaaggacatactcgacctcaggccgagtacatcgagcacaatacttgaccccctggtcgagtgactttggagccattctacccatctactcgaccctcaggtcgagtaaccgcagctcaggccactcgatgacattactcgaccccctggtcgagtatcactttgccacaccacctgataacactcggtcgttcactccaccacgttactcgaccccctggtcgagtatcatcactcaccatgaacaccatcactcgaccaagcacttgatcacatctttggagtctactcaaatttgcactcaaccagacaagatgaccacaaggaagagaagacgaagtatttggaagcggcctggagccccatcggatcacgaagcccatctcggcccattatcactctatgggccgggcgattaggttattggcccgtctactatctttttatttagttttgtataaatagatgtcttagggttctgtccgagaaatctagtcgactttgagtttttgtttcagttttattttctgttttactctcgtgcgccgcttttgcttctgcaacctgtaattcgagactttt

SEQ ID NO: 29783 - DNA, 1189 bp, Arabidopsis thaliana columbia
catatgaacatatacctatatatcatgtgaatttagtagataaatatcctccgaaagataaaaattattatttttttaagtacaactaatgagtagtaattttatgaaatttacagttaaaatttcttaaacaattcagattaaaatcctcaagtgggtaccgggtataaaacaatacaaaattacataatacagtaattagttggaaacgggtttacaggaaatatcgtaactttgtgtttgatgagtcccgaagacagagagaatcaacttatgggaactcggcccctgatcatgtgcattcctatgcaattcgttctttattcttttttttttttttttctatataaacaattgataaacgaactaaaagaccccctcttttgaacaatttacaatttatagtaacatgacactccaaattactctctttaaattagtctcatatatagtaaaaactgaactttatgtgagccacttggatatttttatatgtagaatgatcatatatgtcaacgagattagtaggagtatttaggagttctaaaaatttaatatggattttatgtacttgcgcataactttacgtagactagataaacagtttctcaaattaactgtattatttgtcgtggttttcaaaatctgtaataagcagcggcgttgacgcctttttccctcttatgtttgctgcctttagaagcactttgcttgagcccatgcacgtgcgatgctgcgaagaatcacgtgcgccgggctcaaaggccgccacgtcgatgctcctctttaattctttaggtaacaaagttttcaccgtccaactgtcagtatgtcagtgacacgtacgcacacacccaacggtcttcttgcaacaagagtcgcgttctcattctgctgcgtttgcgtcactgaccgcaatatcttcttccgttttggacacagagtatgtaatgtaatgacacgttctccttttttggttgactttaagaagtcaacggcgttagtgtactgtgtgttgtggaccgcatttggataaccagtaatacaagtaattttattaatcacggacaatatactataaggcaactagtcgatctttgtcaaattactggttttgatatgtgtgacactaatatgtgcataacttcatatatacgcgttccacggccggtgacggactccatgatga

SEQ ID NO: 29784 - DNA, 226 bp, Arabidopsis thaliana columbia
agagaatttagtaatattacttttcctattacttagtgtttgaggtaaggaaagtttctcatcaggtacattgcacttaataagagttgatttagataacgagaagcattgtaccgcaccagttctagcattacctgattttgattatagtatccgtctatgatagtgttggcaagtcgtttgggaatatgagctgtcctgtaccaagagacgatctcagatgatc

SEQ ID NO: 29785 - DNA, 390 bp, Arabidopsis thaliana columbia
gaaaacaagaagggtccgtacaatgagaacaagggaacggcaacagatgaagcttgtggtggaagaaagaggatatggttggtcaataaaagtggaatcagcaggtacaactgtgatgaaacgatgctcccgttgagagattccccagtttcccctgaaatggagaggaacatggcctaactctagcaacggaggcggcgctgtataatccggcttgaattcctgaacaaaaaaaaacatactacttatcatcagatttcattcagaaggacaatagaaagagaggagacaaatagctgttggtccagtggtaaatcttccaggtggaagtgctggattcaaggtgggagggatctcttctccgaaaaagaagaaaaaaaaaaaagagag

SEQ ID NO: 29786 - DNA, 507 bp, Arabidopsis thaliana columbia
cctacatttttccagaaaataccatgtatagtagtgttgtcaataactaaaatttgacagctctaacaacacatggactaattttagacgtgtgatgatagcctccaaaaacgaaaatgcataatctatacatacatatttcatagttaaactctaaaaccttagctttttcttaacgatcttaattccactcttttctagttctttaaccatacagaaccagctagctattcagcaaaacctgtcaacagtgttttacgtatgtaacaaatttagaaatgcccgatttatatttatcaaatattgatccaacgtaaattaggattaaaatgaaacagaaaagtaggaaaccaggatggattcatggcatgaaattagggcacgcgtgagatcttagggcaaagagcctactacgaaggaaagcataagaacaaagaaacgtaaacttttaattgctcaatggataagtgtaataccttataccgtcttctgcatcaaaatactttt

SEQ ID NO: 29787 - DNA, 527 bp, Arabidopsis thaliana columbia
cactttggtgtgcaactcactaaatatccgaaacatcaaagacatgcatgtacaatatcatgtttctatttcttgaaaatttgaaaagaaatgtattaccctttacgtccgaaattataattttggaaaaatacaaaatttctttcaaaatagttattatctatttgtaaattaaaaagatgaatatattaagtgaagaaacctaatcttcaaattttgaaaaaagtcagttaggtaaagcaatattaaataaatatcacaatagacaaacccaaattattttaggattagcaatcgtttttataaattcattactaaaaatagcaccaacgttttgaaattctcacaaaataatgaaataactaggaaatatacgtttctaaagaaaaaaatgttgaatgttatatagtctagaatatagtgttagaaataattaagagaatcgaataaaagtatagaggcaaaaataaacgtaataaagtagatgctagtttgggtggaggaagcaattgaatagatgatttgat

SEQ ID NO: 29788 - DNA, 533 bp, Arabidopsis thaliana columbia
tgtttagataaaacgaaacagctatatcttttttttttgttatcggattttaatcgaataaaagctgaaaaataacagttatatcttcttcttttttaactaatgaaacagttatatcttaaacaaacaacagaaacagtaaaatattaatgcaaatccgcgtcaagagataaattttaacaaactaattaccaattgagataagattagcgcaaaagaaactctaattttagagcgtgtaaacacaaacacgtcttgaaagtaaacgtgaattacacgcttctaaaacgagcgtgagttttggttataacgaagatacggtgaagtgtgacacctttctacgttaatttcagtttgaggacacaactcaagttatgtttgatatctaaggacttgcactgtctccaaatctgcaggaaggactttttgattggatcaatataaataccatctccattctcgtctccttccaacaacatctttcacacaacaattcacacaatttctcgtttttttttgtttatcacaaaagt

SEQ ID NO: 29789 - DNA, 483 bp, Arabidopsis thaliana columbia
gagcagagtcaccaacattttcccccccttttgctggtactggaatgctagtggatctcatggttttcaaactgcactgggacccatcttatgttagaaaaatgttgcttccgatgctgtcgaccatttatctgagagaaaaggcaagaaacaacacaggatacgctttgttgtgtgatcaatacgaatttcattcaatcaagtgcataaaaactagatatgggcatcagtcctttgtaataaggtggagaaaacccaaatctacaagtggttatagtcatagtcacagcgagccagaagaatcaattgttgtattggaagaagaagaagagtctgttgatccgttggatggtttaaatgaacctcaggtgcaaaatgataatggtgacatgcttcttgctaactgatgaatgcataggacttgttcagtctgctttccctgatgaaacagagcattttctacatgagaaggtaatacattgg

SEQ ID NO: 29790 - DNA, 484 bp, Arabidopsis thaliana columbia
tccaccaggtccaaaagattgtcctgcaaaggctgaatggttttgagacgccggtggttgaattgatgaatcactacaagcaaatccaacattcgcagtgtgtaagaataaaaaagaaaggtacaatctaagaacaaaaagcaaagtaaagcaactcgcagcttctcctaaggaagatgaagaagcaaaacccgactgcctaagtgatatagaacacaatatcatagaaaattcaagatacttctctcattctcatgatcctaaacactttaatacaacgatagcatatatgtaaatttgacagttcaaaaaaatctctgagtataatagatccatagcgtgaaatgaatcctaaaaatctcaaaactcgaagaaaagtccgattgaagcatagatacatctatagagaatgaagagcacacctagtggttgaagaagcaccgaacggtgtaaacggcgctggcttagagctcatcggacctaa

SEQ ID NO: 29791 - DNA, 658 bp, Arabidopsis thaliana columbia
  unsure (1)..(658): unsure at all n locations
taatacgaaaaatatataaaattgtactctttttctctctttttgacagtatcatgaacgcagttcaatccattcaataaaaagagatagagaaaaaaaaaggatttcaaatcatactttaatacaagagaagaatcattaatctaaaaagcacacattaattaatgatacaagcataagggaacgatagaggaaagaatcaaagggataggatttgatatgatatatttggtaaaccaagacaggaaagattggagctctgccattctcttctcacttttttctccaaagcatctgcgtaacccaaaattaaaataattgtttgttatagaactaaattgtatactataattaaaataattattttatgcacattgctaatatctacttatagtagtactaggacacttgcatgcatattaatcgaatatgtatctaaaaagctcaacttttggtatgaataacaaaattctctcaactttaagttatataccatgtatccattttccaaacgtttcgttgaactagaaaacaaaattatgttattgcaaagaaattatattagacctnaaccatatttggttaatactacattcttatagaagattgaaatctaagtatatgagagggagatagcatacctttatagtggagtgag

SEQ ID NO: 29792 - DNA, 477 bp, Arabidopsis thaliana columbia
tgctcattgcctgaggtttatacattgttcctttggctctaactagattggtgctatgcagagacataagttgagaccaaccacaagcatttttctggttttgattttactcccagtaaaatatttattgagtacggacaaaacatcaaaaatcagaacaagaccgttgagatggataatacttgtctagagatacgaaccacacccacatgttcctacacacaatccccaaaccatctctctaaccaataacactttttctctcttctcagtccttcaatggcggactacgacgacgaaattgaccagaataaccaacctttcatccccaaagaaactgctctacaagcactaaactcaataatccagctccacttcgagaaaaccttagagaagaaacgagccattgaccaccagaagaagaagctccacaagctatttcagctcttcttcatcttcctcgccgtaatcttcttc

SEQ ID NO: 29793 - DNA, 348 bp, Arabidopsis thaliana columbia
agagaagaaccgtatgtgtattttaggtgactactatacaagtaaaatagattttgttttcgttggttctttgcgaaccggaacatggttagattagagttttgtcatttgtataaagtaaatcatttgagtcaaaaagttgagagaagtgagacaaaggttacaacaaacacagaaagcccaagtagggtcggtttggtagatgggtggccatagcctttagtcgcttccgcggtaagttttgctatcatcattaggtttgattccggtttcttctcttcttgcttctcacacgtcccatatggcatgtcctcctgcacaaagtcaaaaacgttaaataccaatttt

SEQ ID NO: 29794 - DNA, 470 bp, Arabidopsis thaliana columbia
tttgagctcatcttaggacacctgcgttatcttgtaacagagcctcgattcgcgcttccctcagtcgtattcccgctgctacaatctgtgagtcctaatctttttctctctgttaagatctcatatcttagatctcgctctctcttcttactcgattttactctgcttttccagatcgcctgaattctcttctccaattcgtcaactatctcctcctggctcctacggtcacggtattaaacagatctctcttctaaagacagacctttctttcttctaaatcagtttctgttttaccatcttctctccttgttgaattggactggccttacttgtttgtttgttgttctgttatgtttcaatttttgtttctctccagttctgctggtattctagcaaagtatagagaagaaatctgattctattttgcttctccaggacttttctttccagccaaggatatggatact

SEQ ID NO: 29795 - DNA, 1121 bp, Arabidopsis thaliana columbia
taaatatctgatcttaaattgggaaaaatgtggactaaatatcattgttatcgaccttgtgtcagtttaccagaaaactagttttccccgatctctaaattttattactttcattattaaggagcaatgggagcaggatagatatatgaagccaaagatactctatttacattgtcatcagtcatcactacaccactttgaaacttttacttatagtttgacatgagcttaattgaagctagtcaggttcttagtgtagtcatccattttcttaagatcaccttactaaaccagctaaacaataagtccttcatgtttgatgaataaatagatcaatacaaaataagattgatgaaaagttacgaaatctcgaaattactttataatttctctattatatgggttatcgatctaacttttgaactttagctttttagtatcacttgaacatcagcatgttatttaggttgataggagtaggacatttccgaagagttccttcaagaagtggatttttatatcattagtaatttaccattgttggtgcattgattagcacttccaacaatagtgacttaaaccggaagaatcacgacttaaaccggaagaatcttgaattaagctgataattaagtcaaaccgtgtatctcggtttagcctgttaatgggccgaaataaagaggtcgccagccaacttcggccggaaaaaggagaggtcgccagacgacctcgacccaaagtaggaagatcgcccaaccgacttcccgatttgaagaaaaagaagttttcctttccggtaaaggagaatcgcaaaaataatgaaaaatagaagattcaagctccgaataattagaagtttaacttatctttaaaccctcttaataatgtataaatagaggggtttgtcctctattatattcaagaatcagcaacttaatactaaaaaccctagattccctacattgttcttgagaaaaacccaaactttgtttctaaacaatattactcttcttacgatcgagtctttgattaacctaatagcaagaaagtttattgaatttgtttttccattttaaacaaattcattgtgtgattttcgaaatcaacaatgattccatgca

SEQ ID NO: 29796 - DNA, 881 bp, Arabidopsis thaliana columbia
attacctacaagcaatacataaattatccaaagtatgaattacactcttaaatctgaaattcatgagtttctaatgaatcactggctatcaatcaaattcgcacagataaagctagatcagatttgataccttaaatactagtaattgagctacaactagtaatctgaagataaaaattgtaaagaagaataaacacaaccaaatagataaaactcgaatcgttacacagatatatgaaattaaaaacatccgactaattgagctcgtagagagatttcaagagagaaatcgatcaaaaattttggggaattcaaaacatattattgaaattggagaatacctaaatctttgattgggatctgatggcgggacggcggaacaacaactgaggaggagtagctgcttcggaggatgttttttgttttatgaaggttttaagcttagggtttatctatgtagccggacaaaaacgacatcgtttcacaatctctatttatattaccaattgggtttataaagcccataaaagttttgtcaaactttggcccttttattcattaggtatgtatgaccttatttacaactatgtaaaccgaaattaaaaaatgaaaaagacataacaacatgtaacgattgaagatattattcttctacattgctcgttgaaattaatttaccaagctctgattgggctactaaagataggtaaggtcacaattatgggtctgagtcatgaagatccaaacttagaagcaatctattcttagtaaatcacaaacaaacaagaaacttcggtttcattagttcgtttcaccaaacaaattaaggtcatcaaattttctcttgagaacaattcagagttcttaaatctccagatgac

SEQ ID NO: 29797 - DNA, 503 bp, Arabidopsis thaliana columbia
gaggaagcctcagtatctcgacaaagtaggtttcttggagagagctgattacagacagtttgagaaagagagggacaaggggaaagctcttcagtccaagagaagacacgatgatgtatgaaatgaaatgtgaccgacccttttaacatgtatgaaatcattttctcaagccattttggtcacattctttccatagtctaaaccgagttcccgttgcatgattgattctgattttttatgtctcgttcataagaattgagaacatcctctcttgtaggccatggacaatgaaatgggcttgtaatgcaaatgaaatcccaacttctgaagcccatgtttttatttcaacccaattatgaaacgaaacatcatttcatttgtgatcgcaatctttgcgttcttttgaccaacaaaaattagcaaactcaaatccgtatttaggtctgaaagaagacagtgagactaattgttatgctaatttggtttttcgactgtatatggca

SEQ ID NO: 29798 - DNA, 492 bp, Arabidopsis thaliana columbia
tgcgacatgtctttcgtgtgggtttgcgtggattgacgattttgctcaatgtgatttctgaatatgtgttcgtgttggccatatggtgtattcatgaaaataactttatagaaggttaaatagtattagatttaggatatatgtcaatcttctgtttctctatatttactccgatacgttgttatctcctatgaggcaactgctgttgtataaatacctctcaaattctcaaattctactccgatactaaaaacttgaatagtaatcgttttcgtatatgggagtaacaaatcaagggaaaccaaagagaagctaatgttggataatggagaaaatcaaatcattatcttctgttctgtctgctcacataaagataaacaatgtgaaatctatttcgttgtccgcgcataatatcgggaaggtttagaatgttatatcattagtaaattcccaatgttcacacagttacaaaatagttacagtttgctaaat

SEQ ID NO: 29799 - DNA, 554 bp, Arabidopsis thaliana columbia
gaattattcctcttctagaacaaatttcaattataatagaacattaatatcacacctttaattactagcgttttttcttttcaatatttcaaataatctaaatatctaacatttcagataaaccgaaatagaaattctcgaataaaattgtagtttaacatataaaaataaacacttgataattttgtagataaatttttgacgacccaaatcacgtcaacgtatactttggcacagacgaagagctctttttgacttcataaggttggcgttgctttacatgataacgtaaacgaatacagcaacttaagctgattatttttgaggttaatcactacgtacataggataggagcgattacatttgaatgtatagcatcaatcagatgaatattttgtctaaccgcttagcttttccacatattattttaaattcttgaaatagttttattgtaccacatatagaaacctcaaaaggaagctattaaagaattgtctccttgaacaattcatcatcatttattgtaggtattgagggtttcagtagacaggaag

SEQ ID NO: 29800 - DNA, 234 bp, Arabidopsis thaliana columbia
cagatttggtctccctcttcttgttcttaaaaaggcaaacctaattccatgacagatagagtaagaaacatgaattttgacactaatcctgaaactacaggatttgttcgtttaaaccaaggtgaaggtaatagatagattatagattccagatttgcattacacaaacagaactagaacaaaaaacaaaactgtccttccatcgtcgcaatatgacaacaaatttgtccaggg

SEQ ID NO: 29801 - DNA, 479 bp, Arabidopsis thaliana columbia
tcaagtggccatgctgccttgtatttcttcggcttgttacgactcaacctcttaacttcctccctcgtggagagatcaatttccttaccttcctccactttggagaggcacttaccaccattttcctcctacttggagaagttgtttaaaagcttggccgtgatgacttcaagagctcaaaggtttgttcattcgcctttcatggcttatgaacatttcacctcagatcttctacagatccgagagtggaaaatcgatgtccaagcgatcaactatgaagtcccctcgaaggtgcttccggttattatcctagattttaaccttctatcttattttatctatgctttgtattttagctttgtatcaactttgaagttttgagatgtggactctttggcaaagagctccttcattcctcgtattgtaaccgcatattaagattaatataagttgagagacaaaaaaaaaaaaaaaaaaaa

SEQ ID NO: 29802 - DNA, 298 bp, Arabidopsis thaliana columbia
taataaattaattacgtactacttatagtaaatttgttgaattacataaattcataattcaaattttacaaatacttttaatatcctgtgttattttaacaaagctggtctggctcttaagttctcatcccaaggaccatgggatgttttgctttttttttcttttgcttgttggatgagtatgtgaacctttttatggatacaggacgaatcccattgttttatttacattctacattattcgtttatacgcttctattaacctttgattttaaaaactcttctctacctatcaatt

SEQ ID NO: 29803 - DNA, 482 bp, Arabidopsis thaliana columbia
ctgaagcaccccctgctcccataggtaaaacaaagatttaaaataaattgaatcttgaagtatgacttatctacattttcttgaactatattttcccttctactcggctagatataatcatttagaacgtaatatagttgtgctaactagattatctacattttcttttacatatacgtcattttcatatatttggggaaattaatcatgaatatgcattttatgataattctattacatgttttttctacatttttaaacttgtatatggatccatagagagaccgtttttatagatattatgttcatgcgtttctcagatggagtcccttacggtggtcagcaacaacaaaatgcatcacgacgatcagatcacgtggtgatgtcagtgccaccaccgaagtctccctcctctgcaccaccacgtccaccgcatttcatgagcagcggcacagcggagactacgactcaaactactcgga

SEQ ID NO: 29804 - DNA, 298 bp, Arabidopsis thaliana columbia
attgacttcctattgctaatctatttcaaaataaccacgtcagagagagacgagtacatgtaatatcaatgtggcattcaccgatgagtagtatgcagagatataacttgcggttggaataatcccttttgaaaataatttgacttgtacgcacggcaacaaaagaatgatctataggctagtaacaagaatctgagtatccaccacctcttcctgatcctgctcttgttcctgttcgaatccaaactctcactttctctgcgcccctcgtgtctggctcccatcttatgtgtccact

SEQ ID NO: 29805 - DNA, 428 bp, Arabidopsis thaliana columbia
tgcttattctcatagggcatgaaaacttctagtcttctaaattctaatattaagtaatcaagactatagaaaatagttcttagtattaaaaacatatgagcaaaacatatgattatgttggatataacatctttgaaattttcatacttagactcggtttttcccaaacatgtgtgtaggaatatatgatgtatcacctctatatcgtattaagtcctcattagtggagaagcaaaaggctgcatagcccatcaagagtcgataaggatacgctcctatttaccttccaacttagagtggttgaggcggagagaaggatcttggcactaaaaataactcaatcaagtattgttctaatctcacaatgctatttacatatgatagcttgttcttttacgaaacaaacttacaaagaaaatcatcagtga

SEQ ID NO: 29806 - DNA, 139 bp, Arabidopsis thaliana columbia
accacggttcctacagagtcatgggcgtgataaggaagcacgcgaggccctagcctgggcactcgatatgcccgctgacgacattggagatttgcctgccgttgaacacgtccaagacgcttcctactcacttgtcttt

SEQ ID NO: 29807 - DNA, 544 bp, Arabidopsis thaliana columbia
atcccccttcatatccttgcgtgacataggatgataggaagttagacgtacgtagatcagccacaacgcttctagcaacttcatgcgttcctgtgttgatgttcaaagatagacctgtttggtttgtctagtgaaagacagcaacaaaaagagataaatgttacattctccaaatgcaagctcttcatactatctaaagcagtaaatcccaattcatgctagtatattctcatactattcctctaagatcgtgtatagatactactagaatcagatatgcatgatcttatatctcttgtaaagaatcttacttgtatcattttcttaattcgtgaaaaagagatttctctttctctctacatggaagatagcttattcaaacatatgaaaacataaaataatcaatttacgcgtctttctgatttttgtcatattaggttaaccgtggcgttggctataataatagcaactgcaaatatctttcaatctttttggacattgaattccactttttataagacagtactcacacacacaacactag

SEQ ID NO: 29808 - DNA, 536 bp, Arabidopsis thaliana columbia
gagtatggatttgacttcatattagatttgaatggaattgaatatatgctttacttataaatagagtgattgaaatccttgggttccacctagttatttgggttgatttggaagaaaacaatattttattatattttaatctcatccggttaaaaaatgtatggtcgcttgttgtatagcaatgttttgaacaacaaatagaataaaaccttcaagcatatcaatcatgaaaaaaaactgctaatataaagatcatgaaacaccatcatataataaaaaccaacaatactagaaaacaaagagaagcttttgaaaaccatatgagactagaagaaaaattatagaaaaccaatgatacttgtaaacaaaagataattattatagcactccatcacgttacgcacaatccaaccataacgatcatcaatcggtgaatcagtttaacggcatcgtaacgaactgtgtttccaaattaagaacttctttgatagcttctcatacgttattttacttcttctcagcctctctttgttcag

SEQ ID NO: 29809 - DNA, 458 bp, Arabidopsis thaliana columbia
tttcgcagcttcataaagtcatgacgttgaggtagatgaaaaaataaacatttctagggttatgatactggaccgctcaagatttttaatttgtgacttgtgagctaggggttggaaatattcatggtctctcttgtgaccaatatctaaatctcttaatactcactagacacatttcgccagctaaactaagtacaatacatattctaaatcaagaaaaggaattgcagtctttagttctagacgttcttttgtctttatttgggtatttacattgtattcacaaactttttaaacaaatatcttcgagccaatacatgcttctcaaatacatggaaattttgatttattgttagtaattcttatatactttctttgttttttcatttgttaaattttgatatcattataaacgaccttcaaatcaatgttattaaactcatccagaaatgtgataa

SEQ ID NO: 29810 - DNA, 560 bp, Arabidopsis thaliana columbia
tgacaatgtgggtatatgttcttattttcatcagggttaccgattccagaagaagcttcttcagcaggtaaataaatactccataaactgagactagcttatctctcggcataccgcatacccataaacgcagccatcaaattgcaagctcacataacagtatatgtggtatctagtatcatcatattgatgatatgtttcttgatgctatatcttatgagttgcagatgaaggagaagtccaagaagagcaacaagctggttaatggaggagagaaattcgattagtaaatctaaaacccctcgcgaggttgacttaccgtaagtttcaagcattctacaaatgtagtcaatacttaaaactgaaagggtagttagttttctctgttctggtcttccctgtgtcacatgaaaatgctcgtgacgagttcctatctgaagttttttttaaaactcttttggaattggtgtgtgtcaataaatcctttttgtatattttaaatgtgacatagtgcattcattgccttgtacaagtcctactctgatagtattaagtaagtt

SEQ ID NO: 29811 - DNA, 221 bp, Arabidopsis thaliana columbia
cactggtaaacatgtttgaaacaattgtaccctaaatcgatgaacggtaagaaagatggataccgtgatgaaggcgggtgagaaggaagaggtccatagtgaagaagatgttgaaaaataaagatgagaagatgaatttgaatcttttgctatgaaaatggcaaagcctacagcataagtggcaaatgccaaaagcaaggcgttcaggtaagtcggaatgt

SEQ ID NO: 29812 - DNA, 945 bp, Arabidopsis thaliana columbia
tgaaagctcgcatgtgtttctcttctccgtgttaaacgctgtcgtttttggcgtcactgttatttcaacacttttctccaatctcaccgaacgtttattttcccttccgttttctcgagaaaatctacctttttccccgagaaatttcattttctctggttcacctgcttgttgctcgcttaaatacagcgatttcatccaaccaacaagtaccttcaccaacacactgatggatcggaggagggcgggtagccagtgtatggtcgccagtggagcgaatcatcgaacagtacggaggcaacatcaccggcgatgtctcctgctcaccggaaacagctcggtggtatcggaggtttctccaccgttaaacggactcagaacgtagctgccaaagccgcggcacagcgattagctaaggtcatggccttacagaacaaagacaacggagacgaagatgatgaagatgaagatgaagatctaagtctcagattcgcatctgcttctttaaaacctgctcgtcatgcaccttcttctatctcctccaccggaagcaatagcagcaacggaaataataatttgccggctgtttcatttgctccccgaactagatcgccgtctcctgcggtgaattccgtttttctagctgattgaattagctcagattagcttgatttgattgtagttgtggtgaatttgattctttagggctaattagtctctctctttttttgtgctttgattagttaggcaggaacttcgccgagcaagtaccttcttcagtgcggtctgcttcagccggaaggcgtcaatgtctgctagatctacgactccgactccgattcctaatctaatgccgcctagtagggtgtcggtgaaaactccggtttctattccccacttgatccccaactcggagcagagataaaaggtgataacattttgaag

SEQ ID NO: 29813 - DNA, 566 bp, Arabidopsis thaliana columbia
attcacacacttttttttcgcattacttcctgaataattaaatatatggaccgacttttatgttccaaatattaattgttttcatgtatagtgtatgattcatccgacttatatagtgccgaatattttctgttctgtaattgctggcgccatgcactattattatctattcctaacacataagtattcttgttttagtggtttacaagttctgatttttcaaaaatctgaccgttcaatttcaacttgtgaaatctatgcgacaaagaagaattttttctctctctcttttttttttttttttttttgaaataacgggagtatcttaaatcaaaaaataaactaattaccgtagcttgtaaaagaatggatatatttgccattaacatttcacattcatatataaattttcgtcaatatcattatccaattcatgacgttaagattactactatagagattattttcacgaacaagacagaattcagagaaagaaagatatgtggttgagtcccgtagaccacgacacgacttaaacttaattatgacatgacaagaacatgtag

SEQ ID NO: 29814 - DNA, 591 bp, Arabidopsis thaliana columbia
gcccctatgatatatcacatttctttcaaaattctttttttttttttttttaacaatttattgagatctatcatgtagattagggagaactatagaaatgtcaataagcacaaaagttatctttatcatcaaaagctatgcgacaacgctcaacaatcgacatccacgcatctagcatatgttgaacacataaagcaacccgactaaatcagcatactccatggatattactctttagatcaccaagaatggtagtctcgtttgtcctttagatgtcgaatctttttttcgaaagcttgtaaactcgaagttctttgaagaacaaccctactcccaatcaacattttaacatacgcataatttcatccaaaacacatacaaattgtttaaaccacattaccattcattttatagcatatacggttggaagtgctagtttatgttcttcagctcaaaagagtggtagttattctgaatagaaaacaaaccatctgaaaatggcgggccacgtgaaataaaatagaatatgatgccaattgagacaataatatatatgcatagtcgtaataagagtgataaaagctttgtgaa

SEQ ID NO: 29815 - DNA, 503 bp, Arabidopsis thaliana columbia
tcccccattatcccgaaggcctgcctgacaatctaagctttagtgtcaactctatatgttatacgatgtcctttacgatctttgatttgtgatctactgatgctaagttcagcttactccttaacctcaatagtcttgataggtccttatcatgtcttgacattattcaaaccacacttgctttctttcaggacttctcatgctaattctcctcttacggtcttacccattggtatgagatgtggaattgtttcgtcgtcattaatttctgggtcttagtacatgctagatatgtaaatccaatcctttggattccaggaatcttcttggattggattatcaagcttgtcttttgatgagaaaaccttctgcttaggattcagtttcctgaaaatgtgcttggtatgttgtcaactgtggttcatatgcatgtcacacgagaagtcttttttttttctttctcattttttaaatgatcactgctttcacgtagttcaaggagt

SEQ ID NO: 29816 - DNA, 824 bp, Arabidopsis thaliana columbia
aaatttgtctaaatgaggaagaaagagaagtgtgtgtcatcttcaactaggctaaggtgagggtggtatttgcgaaacatattatcattttcttttgttatgcttcttgacgcatgatatgtagacttagatctgattgtgtagaagaagattagatgatgatatgacattctgattgttgagtatgatgtttgataatgtgatgttatgtataatataataagtatgtgtatgttaagtacgattatgagtatgtatgtatgatgaatgtaagactggggagaatcgagctatgggccatggtctccctagtgatgtggacagtgatcggccgacggtgtaacaggtcataataagcagatgacgagcccggaatgggagtgtctgagccacgagggccagcctccacttatgaggttctagtcatcacgaggatgactggacctaacgatgtgtatatttatattaatatatatataagatgattgttatgaatatgttgttagaagttaaagcatgttaggttgattgtgtgtgataaatctatatgttatgattatggttgtatagctttagaaagtgttctatgtttcagtgggcaaagttgattcccctcactgagtattctttactcaccccctttttttccttttttcctcaggttagtaagcgtgaggagttgtgtgcaatattttgttcgagtatgaagtttaaagaaaatgtttttggcaagatcagataaataacatgctgtcttagtctatatggcggggcgggtgttacacttagattcttgtaaagtaagtgacaaaacttgagagggt

SEQ ID NO: 29817 - DNA, 723 bp, Arabidopsis thaliana columbia
cgatctacaattgcagacaaatcctgcgcaccttgcattcttttctcaagttcatccatccaattatactgaaggaaggcaaaaattgtccctgaggataaaccttgtctcggacaagtcatttaagaagttgtgcagcaccgagtaagaaggtagaatccggttcatctaccagtaagtttgttcaaattatttgcttactagttttgatattttggtatgtgaaaagttaataatctattatagttggtttctcttgtatggtttaaaacataaacagatcggtatctttgagcttcttgattgctcataacagatctggagtacccccataatatggaggcagacgccagtgacctggttctgaatgtggaagatgcttagagattgctgactatacaaggaaatgctggtgaggcttatgaatgaggagcaagtaaaaaagaagaaggaaaggtaatgcaaagcatcccaaaacaaaacattcgactttcataaatgtcttaatcccatgtttacataacacttttaagcttaggattgaaatcttgaagtggtcatgtgttagttacaatcacgggtagaaaccttaagccatttgcagttttgtgcctagataagaacctatatacagaaagatcataaatacagtcagcctactctaagtgttacggataaattagatcacctgccatagcagctgactcacctctacaaacaaag

SEQ ID NO: 29818 - DNA, 1388 bp, Arabidopsis thaliana columbia
tttgacctcaagaataatccttctcactaaacaaataaatacttgagtgtgaatccgacatccacaccgtctatcctgaatgacaccttctaataagaaagtccacgccaacacatttaaagaatgtaatgagttgactgacgtgaattcagagttctgtaggatcaaagcggatggacaaggacgagaaaggcgtaggactattgagcgaccgttctaacgcaacttttgtttaatgtggtctgtaggatatattcgagacacggtcaatgataacaggagagttcccgcgatttttagaactctccaccagatttgttcttttgtttgcttgaggacaagcaaagtctaagtctgggggagttgataacacgactttttagcccgttttagctattgttttcttatgtttcaaagagcatttggtgccattctagagccaataagaggagaaacacacattctagatgccaagaaggttttaagagttttgatgctaaaagtatcaaaagacgatcattctagtgcttcggaagtttagcatccggccaaggtcttccctatcccggcatgaggatatctcggtgtcattggacagctagaagagtcaagattcacgtcgaagtcaaatcatagcaatccatgaagccgtttagaagatatgaccaaagagtaaagacatgtcaagaactggctgtttggaaataataagtccaaaacacatccggccgatgagacttgaacacgggcagctcctagtagctcaccaccgaccattaggtcacgcccaagtcctttcctctttgcactgccgtcattagtctcttgccttgaagcccactactcggcccgatcacttacttatccggcggaatgacgttcttacccctaaacctaattcttggccctcaagtataaatacttgttctaagccctaaccctaggcgtgccttcatcaccatcaaaccctacgtgtcgccaagagctgcccacttgccgccacacctctttaagcttgaagaacaccatctctctctttctctttctcgttttcgtgtaagactctttaaggtggagctttgcctcttgtattctacattcaaagaagtaatccctaacccgttttctagttttattcatcttttagttatggtttactcaacccaacttttgattagcttctttgccatgagcgagtagatctctagttgggtttgagggggttttcaaaggggaattcatggggaccaatagatcgaagatctaggttggtggtttctatggctttgtttgaccgtttacactattccttctagttgagtttaatcttaatgcttgtatatccagaacgccacctagtacttgaccttaggtatttcattctttgg

SEQ ID NO: 29819 - DNA, 457 bp, Arabidopsis thaliana columbia
attaaatgtctgtctctatctcaaagtcgttgactttcgttgttgagtgtctcttactgaccaaaccgccattagaagtgttctcaatgataagacgcatttctttgtaccaaatgtcaaatttcctgaattgcccatccaccgaacatggactcatttcagaaatgaggatctttgggtcattttctcaatatctggtgttgctttccttgtaccacacgatccttatagctcatcatctaatggccatttaatccgccagagaagaagaagaagaagaaaatagattagggtttttcattccagaatagccctaatccaaattcgaaatctttcttctgattttgatctttccgatcatgtcatcggtctgtgttaacgaagcattaaccgatgacgagctgagatgggtattgtcgagactagacagtgataaagataaggaagtgtttggttt

SEQ ID NO: 29820 - DNA, 484 bp, Arabidopsis thaliana columbia
cgtctctcatctgcacaaaaaaacgtgaaaggtaaatatgaaatccgcagcgaagatgatcttggcaaccatccgttgatgggagtccggctgttcgacagcaggaccatagcaagtcatgccatctgaagacttggctgtagaaaacttccagagagcaacctgatgcaagataacgaaaataaaggggtcaacgcaattaagcactgcaattcttgttcctgaatacatttacacatatgcaagaaaacagagacaaaaatatgatagagtcagtgaagaaagtgaaataatttactaattaccgtgccatcgtggcaaccagccagtaagaaatcagggatccctaaagtcgaccattcaactgtcaaaggaatactgtataaaaatagaggagcaccatatcaagagaaagccaatagataaagcataaggaaactgacaatcaattatatattcaactcttaaaaacatagaaggactg

SEQ ID NO: 29821 - DNA, 515 bp, Arabidopsis thaliana columbia
tctaaggttttactcttactgctattgattcccaaactatacctaaacaagcaacaagcaaaactcgaaacaacaataaatgcactaaaagacttaaacgaacaaacttctattccatcctagtttttaggcctctacgaattcagatcatccctcaaggcattgccacacactcctaaacacgaaattctaaaagagatcgcatccctcaatactacatcgtcatgttgcgcccggtcaattgcaaagtagccccgagcctttgtaagctataatgctacggagtttcacgcaaagaacagcagacggatcggaagacatgattcgactaatgctaattagctatccactcctaaccaagaacaaataaacaacaaaaagttcccaagtaatcggacagcaccacagttatgttaccgtaaatcggacaagataactgttatctttgtcggaatttgggcagcataacgtttataccatatttgaacataatgcaatcataatataaaacaatg

SEQ ID NO: 29822 - DNA, 490 bp, Arabidopsis thaliana columbia
gacccaattgttgactcatggcatttgattgctgctgtaaggaggcagaactcatgacattaaaacctggtgcctgaactccgattcccaagcttccatgaggagagatggaagagctctgagaaacagattagaaaagataatctcttaatatgatggaatggttttgaatactattaagcatgtgattattccatattgaatatgctacctgctgtaaaagaggattttgctgttgtgaagaaaactgcttctcgtttcctccagataaagaaggtatgcctaagaggttaccatggccttgctgtacttgctgtaatctctgtaagaatttctctctttggtctggtgctatttcagttctcccacgaacctaaaagccaatgtacgtagttaatagtagaaaaagaagacagtagaaagggactaccagtagaaaaataagtaaagccctaggaatacatctcaaaagagcgtggttaggattatg

SEQ ID NO: 29823 - DNA, 1035 bp, Arabidopsis thaliana columbia
aaggctcctcttgcgaacaattgctgagtcttttggatatgctgcaaaagggacttggcgagttgactgagtcgcatgcttatctataaatctctcagtactggaagcagtgttgctgcactccgatgaggaaggactacaaggaatgtcctccattacagctttatctagcaaatctttctcagaggtcaaaatgccaagaccaacttttcgactttgaacaaaatgctgctcaatcaggttgtagcaagacggtattacgctgtaaatccctttagtttcattggtgcagtccgaaacaatcagaggagttccagtgcagttatacagtaaaaatgggacaaagattaatacttcccgagccccacatgttgcatccattgttttctcacacgatacataaacagaacctataagaaaatcaatattaaaattgtctcaaaatgagtagccaattttaaacataaagaggtaaatcttaccaccaccaacgtgtgaatcaaaggaaatagtttcaatctgagagaacttccctccactgaacttagcctctgtgctaaaagtttctgagcgtgaaaactttaaagatgatgttctacagccatttaatttgaactcaaggaccaggtcatgtgaaggatcaatatgatggaatggcgtctccccctaaaaataatacattttattgtcacataaataataccatataaaccatataaaaacatgatttcaactcttatcttccagaacgaaattatttggaaatatctctcagacctcaggaagggatgcagtttgagtgatgccaccactttcgatagaaagtgatattggatctggaagacagttgctcacaacaaatggagtgcttaaagttacttgatgaatgaattgctctcttgattggtcaagattgtgcaactgctgaccaaaatttccagctgacaaatcattaatatgaaaagatgccggcaagctggtgctctgaacagatatgaacaccgaaatggttcatggctagggtgacatggatac

SEQ ID NO: 29824 - DNA, 479 bp, Arabidopsis thaliana columbia
tctttcgatttacataaatttgctcttcttatttggtgtgtctgcagttcggaagttttgaatagagatcgttaaaaatggtggatcctggaccaattactccgggccaggtacaatttctccagaaaacttgacactcgaactgaattttcgattcaatgttgagtcggttaggttgatttattcgaaaaggttgagactttaactggaaggaattatgactgtagtttagtgaaagacgccacttttagtaggaggaaacctaagagagtgacttttaatcttcaaaagttagcctaaagcatatgacaggttccttggtctcatcagcatctttgacatagcaagtataatgcctgaatctttcacatttgcatttttggaggggatttactgaaatctatatggaatcgagagattcagagattgaacaagttgcagacgctgtgcaagtagtattcctgtcaatgatggatatg

SEQ ID NO: 29825 - DNA, 546 bp, Arabidopsis thaliana columbia
cccctgagaactactctctacggcctccaatgcattaccacacaaagtctccacttgagtatcaagatgtttaggggcaactgaagggagtactggctctttcgtctcaaggcgaaccgcatcgtcatacagtgtaatcaaatcaaatgaagggacaatgcctagcaaaaaaacaacataaaggaatataagcactcaaatgaaatgaaaaattgcctagcatcaagaacaccggataatgcacacacaacaactttgtttgctgcattccaaaattagtgactgccaaaatgtaaaacaactcactgttggagaccgatccttgatcgttgaaacctgcgaaaaccggaatcgattcctttcccacagtgactggattcactggaagagtatcaacaattctgtttccaagagtattagactcactagatgaagctggattcaattctaattcaaccacaactccaagtctgttccttttcacattaccatcagagtccaactcagtttcatgtagcaaactctcaccatcctcccatttaaaga

SEQ ID NO: 29826 - DNA, 439 bp, Arabidopsis thaliana columbia
caatagcaagcgaaaatcaaacaatactacaatagtattagttttaaggtatctagtatgtagactccttttattctcttaattaaccttttggtttattttgagtcttttcatataagatttctttgtgacgacctttagggttagagttgttttatcggttcgatttgtttccaccactagggtttttggatgatctcagtatttataattgctaaatacaattcacatttgttatgctaagtaaagtatacacacttaatattaatcagactctatttgctggttaattcaaaactatattctcttaatctctttgacaagcaacaaaaaccttttgcttccaagttccaacgtctctatctctcttattttttttccttggacaaactcgtctctaatacttatcaagaatttaacttataaagattcctgtgaa

SEQ ID NO: 29827 - DNA, 585 bp, Arabidopsis thaliana columbia
tgcttatatctttacctcgtgttgctcttcttgcacaggcatgatgagggagaaattgcgttgcatcgagatgattctgtctgctgtgttgggatctctctctgtcttgatgcaagagagattataaatattatctgaacctttttgcttttttgggtatgtgaatgtttcttattgtgcaagtagatggtcttgtacctaaaaatttactagaagaacccttttaaatagctttcgtgtattgtgcctggattaatatgattgattgttttgctttcttgtttttgcgtatcctattttcacgtctgcatcgttttcatcacagaaatatctttctttctttaccaaaataaatgaattagaaattttgtatatttgaaaattcatatcactattggtcattgagtcatggttgtaatggtcatgagtcattgagtcatggttgtaaacttcttcaacaaggaatagatcccacatttatatgcagtgtacttatgaaacaaatattatattatgtcacatattgctgggtgatcaaaaacctcaagatactattatccagaacatggactgtgtgagctgtgc

SEQ ID NO: 29828 - DNA, 533 bp, Arabidopsis thaliana columbia
gttaagctaaaaaacgtggatttcgttaagctagtgtttagttgcttcttggaatgcagaatagcaaaccaatagaaacaagagaagatgcatttgattaagaaacagagtgcatatatttcattaacttgtttttctctttggtttgttgtctatttattagctttctatgtatatatgtaatcatgatttttttttaacaatcctatgaaaagctgacaaaagtttgacggatgggaagacatatagtggtgattagaagcttttttatgaacagaaatgttaccttttcgttttactggtgctcctcctgatgtctgaaagctgacatcctcttcttgtatttgtaacgcccgaaaacataatctgggaagagcctgttatgtgatttcatgaaaacaagttgatcttgtgtgaatgttgggagtccacatcagaaggtgaccagtctttgtttctcgcatggttcgaagtccacagaaggtaaaccaagcctggtttttgcgtctctgtttcacgtcagcagaaggtga

SEQ ID NO: 29829 - DNA, 576 bp, Arabidopsis thaliana columbia
tgatacttctgacgcttaagctgaatcttccaaatgaaacaatgaaccgagagcgaaagagaaagagagatacggcacttggaagcaattactgagtggttcgcctactctttcactccttgtataagtattattttaataataatattaggagcaacgtttttgtatctagtgtgacgtttctccttttctttatttaattaagccaattcagttagagtagtcatgcagtaaccaaaagattcaagcctaccctcaactatactcgcacacattcagctttgaacacaacggcttcaacatcgtgggtatggtcgtgtctacgtgctcagaatatctagttgatggtgggagtcagcagggttttgaccaaaccacagtttctcaagtcctcattacattgaaaaaagtatgggcttaaaagaagcctagatattgataataggtccatcacctttaatgggccattcagtttgattatcttaacggcccattaggattctccaggtgggacaagtattagctatgtcattaagagcttaatacagctggaagctggtgattattgttcatgtt

SEQ ID NO: 29830 - DNA, 577 bp, Arabidopsis thaliana columbia
tattttcagctggaatccgaactctgatatagaaagcacacaacgttcacctccagtgacttctctctatctctaaatctctcttgcgtcacttaaaaagtcggtgcttcctacttaagtgttcttgagagtgagacgtttcatttctgggttcaagggtgtagaataaacacttgagtgaagtttaaagcttgagaaagacagaggaaagaaaaatgggtcaaagactgaatctagtcttctggatttttgtctccattcttgcctttttgagtatgtctttacactcaaatcctcttttgggtctgcatttacctttgattctctcttctatgtttcactatctcttaaatttgtcttcttgatgttaaagttcgatgctttactttttgtcctgggttaatctctgtttcactgtagtagttcttgtctgaaaatctcgaatctgttagctttgaactacttttaggtgtttggaatcgacatttgagatcaaaagcagccatttttgagacttgttttgtggatttgttgcagattttggtatggctagcaagattgggatatgttatggaag

SEQ ID NO: 29831 - DNA, 538 bp, Arabidopsis thaliana columbia
taaataaaaaaatagtgtgcattttatataaataggtgaagatttacagaggaaaaagttggttgtgactttgatgtcctatgtaaggttaagacaaagtttgtttgctttaaatggtgaagcaaagatcttagctttgcgtgatcattactaagattctcttgttagaatctgacaaatgactagagtagctttacactgtgacattatgaccatatattttagataatcatcctacatatggctacaattcgagatatacatacattacaaaactatatatatgtatatagacacacatgtatggtgtatgaactcatattatatatattattttctatgtagaaaaagatattatttttttttcttatgccaaatgaaaattttattacaatttgaaatctaggaatattaaacaatacaaattttgggaaaaaaatgaaaaacagaagagctgaaagtgatgggccttgatatccgaaagatatttgccatgtaaagttacattaacagtggtttcgttgggaacttagttaga

SEQ ID NO: 29832 - DNA, 491 bp, Arabidopsis thaliana columbia
gaagctttctttggtttaccccagcagaaacattaatcaagttcaattgatcaatatgtcgattgatttactgtttaaaggcatagtgtgtctatcaacccttaagtctttttggtggatagtgaagctcaaacccaattcaaatgtcgatcaaccctaacgtttttgtgctcgatagtaaagcatgagtataaaaagaacgtcgcttcttcctacaatcacacagatcatttgaagctttgattagttggtacaacatactcgaggaatacagaatgacacgtggtgtgtatctgttggataaatttgtattattcttctttactatggatggtttctggaaggcgcgccaagagtccttctttttccatctacaaatcatgaccgtccatctccaaaagaagactgaaacagtgaaactagaagcttcattttgatcatcagccagttttataaattgatccgtatactaaagtaacaactactagcac

SEQ ID NO: 29833 - DNA, 586 bp, Arabidopsis thaliana columbia
atagagagagggagagagcataattgagattgaagtaaacaggtcgcgtgagagggagagtgggagagagagagagacccgttttattcggatctgtgacccgatccgacaaatacggatctacgtggcttgaagtaagaagggtcgacatgtttccacttttggcaaatttcatcaccctactttatagtttggtacattatgaaaagtattcgagcacgatctgatttcggttgaaatgttgcactccgagaagcatgatcacccagatcagtccatacccgatttcgtctcgcagtgatgatctacgtgaagatcttattcaagttactctaagaccatctccaaccaagtcaatgtaaagcccaaacagaaatactccaatctatttaaaattcatttgtggcctttcgacacaaagttaggcccaacttatttcattaaatcttaaattattcatattcaaaagagtgacccaaaatagatatagaacgtcaacaaaggagaggacaaaactgtgtttttttactttctagcgagagatattctgttttttgacttaggccaaaacagagctacaagacaa

SEQ ID NO: 29834 - DNA, 447 bp, Arabidopsis thaliana columbia
ggtgttgactggtttttatcttttttccagtcaatcggattattatcgattgctttacttcttttccatgttttctttcaataatttctaaaaatctgagttggtaattagttttaagtgctagctatttaaaattaatgtctctggcttttggttttagaaacctcgatttgcaagaaatcgttcaaacgattacatctgggtttgaaagattgaaggataatccgatgcttattaggattctcttaagccgtctatttctttgggagctccatccatatctattctggtggtaaacaaagattattcgtacgttttattcggcgatgttttcctccaccggatttggtgctcgtcgacggtggaggctgatgtccgtacacttccgatgactcatttacatgtgctgtagttataatctcatgtcaacacgtgtctttggataga

SEQ ID NO: 29835 - DNA, 820 bp, Arabidopsis thaliana columbia
ccccgagaggtataaagtcagagtctttctgatatgtacgttggaggaaaaagggaacaaagtctttgttagcgaaaatgagctaagagctaacgtgatttggtttggtttggccgccgacgaaaattattattctttttataaaaagaaagtctatcgctttaattttaaaagtctgaaaataggtcaaatcttgacaattattccacgttactatttgtattagccaattaccttccagaattctgtatactaattattacaataatgttgaactgtcaagacgtcagtaaattaaataagaaaaaacaaaaatcattgagattgatcattaagtagatataactagatatattattttaagactattatgtagtaataaatatttttttgtcatcttattttagttagaattcaaaaaaattaaatctaaaaaaccaaattatttgttttgatattatgtagtaataatttgtatagattaacaaaaaaaacttaggacgatttccgaaataccggaatattgttataaatattgcttttctcattctaatcgaatatttttcagctttgttggtttgttttctctcggttatctgaatctaataaaattccgatttacttctttgctaagatcaattctctctatttctacaatatctcacttggaatttcgcttgccatagttgatcttcccgtcccactgttggcttaactccaatcttgagctaaaataatatatttgttaattattatgatgaggactcaactaggtcttaggcgtactatttgctagaatcatggttaagatgatgaagga

SEQ ID NO: 29836 - DNA, 855 bp, Arabidopsis thaliana columbia
accggatattgtataaatattgttttcccattctaatcgaatatttttttcgctttgttggttattttctctcccttatctgaatctaataaaattgcgacttaattctttgctaagatcatttctctctatttctacaagatctgaatttgaatcctgcttgccatatttgatcttctcgtcccaccgttggcttaattccaatctttagctagaataatatatttgtcgattattatgacgaggacctcaactaggtcttaggcgtagcttctgctaggaatcaaggttaagatgatgaaggattaacgatatcttcttgcaacgacgaaagcggtggaagtcaatcgaatttgcaacgacaaactttgtagaaggagtttggtggtggatttgtgaagttaggggcagaatttgcactgaatcgtggatcttgggcggtaccgactgtatctctctctccttctcgcgtatcaacacgtgttgtacatgtggcaccttagagcaaccacagtgattagtttataaagtttctaagtattttttattaaaaagttttgatagttttgtagttttgagattttgtacagtttttgaaaattttatggtccattggtggaatccttaagtgggtttctaaaaaaaaaaaaattgtcaatatttttatttgagcaaacatgattattattattaggattttttttgttttttgaatttaatgttaaattatattcaagaaaaaataaacatgtttacatcaaagtgtatactgtttttaatttaaatcttgataggaaaaacccatagattaaaactgtatacgccatatcaactttaatacacttactttgtttg

SEQ ID NO: 29837 - DNA, 476 bp, Arabidopsis thaliana columbia
aacaaaacttgaaaagaaatgagcttatggagtaaacactcacggctttggagaatgtgacatagttgattcaagcctgcgtaaccagttaacgtattgatcatgctccttcttgttcaggtgacacaaaaggaaattagttaagtcttcactgattcccttagatattaggtattgctccagtgcactgtgtagtttgggatctacttggctaaagaaacaaagaaaataacactggtcattgaaatcaaacatatgcagacacatgaacctctaatagtctacttctttttcaatatatatagaacaattactccagggaaagaacaatgggaagtgtacccaatgctttgaggtttggatgaagtaatacagatatgattcaagtaacttaaacaaaatgttgagagattatgatttatgaggttactgcacgtgaaaaaatggtctccataagtggaagaaggagcagaaac

SEQ ID NO: 29838 - DNA, 1255 bp, Arabidopsis thaliana columbia
gtagagtaaaatggtagaatggacgtacgtgagtaggtaggaagccaaatatattagtaggttgacgttgtttatatctttttgacaaactctagaatgcttaaaactactagtttcagagtttgtacatatgttttaggattttattggaaacgaatgacatgttttgtgcttttatccatgtccaatagacaatagtaaaagtttcaggtccatatggatacaatcttgaatttttaaaaaatcttcatgtggaaattggaacgtagtgaatccgaggaaacgtgagaccatcttttttgtttcattcacaatttgatcagcggtgggtgataagactcatgggattgccggattgcacctcacatcggtttaacatacacgcttgatcatctaatcagcgagtttgtactttggacaaaaaacctcaacgtcttctctcactcctatccttgagagacagaggcgacttctgatatactggaattcgtattccgaccttaccacttttgttgtaaatgtattgtttccgattctaataagattttcttttcatttgtcagtttgttttctccggcttgtctcttcttacgagatctcaatcggaatcccgcttgccatcacttgatctccccatcccatcgttggcttatctccaatctttaaccaaagtaatatcttcgtcgactactgtgaagaggacctcaactaggtctgaggcggacttctgctaggaatcatggtttagatgatgaaaatttgaagataccttcttgcagtatcttcgagatggaagcggtggaagtcaatcggatttgcaatggcgaactttgcagaaggagtttggtggtggattcgtgaagtcaaaggcggagtttgcaccggatcgtagatcttgggtggcaccgaccttgtctctctctcctcctcgcgtatcaatatgtgttgtacacgcgacacgttagtttcttaatcttatcatatttgatttttttttgccgttaaggtttattatttattgcaaattatgagaattgttacatagacgattttacaacggacaattccttccaacccttattagatccacgacagcgacaactcctcttcttcttctctatgcctttgatggacaccttcaatgatcttctctgcttagaatcctgacgaacggctataattgtgcatcgtttgagatctcctgcacacttacctctattaatctgcaaatcgtatatttaagttgttgcagttg

SEQ ID NO: 29839 - DNA, 518 bp, Arabidopsis thaliana columbia
  unsure (1)..(518): unsure at all n locations
gtttgtttcattgactagtaatgttaattaccttcgataatattgcagagagttagctaaaattctcaaaagatggtacacaaatagttctttcgcaaaatagatctcacagaaacagagtcacggttttacaaaattcgaatttcacagaacacaaagccaaattccaaatacaataaagctcgtacctaacaaagcaagtccgatttgagtttcttcccctaaaaggatcccaaaagcggcggttgcggcaaaggttgtggcgttagtcaccggaacggcaagagagatgggagcgtgactgagaagggcgaagaatgtggcggaggcggagaggtttatgaggaaaggaattgagtattgccagaagaggaggagattgatccagtcgcggagagcaatcatgattttgcggcggatctgaagaggaggagaatgagattctgttgtcgaagaagactttgttttatccaggcaagacngccacgacggatcagagcattggtggctcccatacg

SEQ ID NO: 29840 - DNA, 690 bp, Arabidopsis thaliana columbia
acatgaagaagaagaataatgtgtggtctatcgtgaatctaataaagattagaaaaaattgttcgtagtaaaatcgtctatgtaacaattttcataatttataataaataataaatgtatatggcaaaaaaaaactgagattattgatttaaatttttgataggtcggttcaatacttttaagactgagcttctactaatttctggaaccttaattataataatcctctaactaaaaataattcgagctcatttaaaatacttaggagattatcttatttcaaaagttgttccggcggtttataaaaatatcatgtactaattacacataaactatacatctagaccaggttatagactttaatatatatctcctatgagagtctacgagactacacgagggtttgtttaacattaataagttacatacgcctgcaattagaaaatactaaacatttctaaagattaaaacatcggatctaaaagttgatgtgtcgatctaaataaatatttactatattcttcaccacaattcataaactttggcttttcgatatgattacagccaatgagaaattagttaaaaatatgagccaaaattgttaaatcacactccactaaaaaaagtatcaaaacctttttcatgaaattatcgcttagtagttagtactctttgtaacaatagttatac

SEQ ID NO: 29841 - DNA, 564 bp, Arabidopsis thaliana columbia
tcagtcaccttgagattaccttcttaattttcttaaaaaacaatagttaaaaaggggttggatttgggaaatttgaagttgaaaaacattccccggaaaattgatgagatgtcgacgttggtttagtttacattttgtgttagttgtctttgggaattaagcctgatccaataataaaggaaggattttaattacagctttgacagaggattgttgtacttcacagtaaagtccaagcttgaaagtcagggaaaagtgaggtactcaaaattgcgttgtgtagtatatatggacattgatgataaattagtgattaaaatgtggaattataaacagagaaagaagcagaactattttcctcagcttacagttctctcagtagcaaaaatacattttttcttggtcaattatgatccaatcatgtagaaaatagtttccagttcaagatcaattatttctgaaatatattggttttaactttaactatcaattatattatattttcaagccaaattacatttagacctaaatcaatgaacagcataggacttatataagatacaa

SEQ ID NO: 29842 - DNA, 472 bp, Arabidopsis thaliana columbia
tatataaataattcattatgatgaatttctcaaacaaaatgtatcattttgtttgacgagtatatgtgtaaaatataaaataaagagaatcttacacgccaaattgtaagattttttatagtagtcacgtgcgtgtctcaaagattaatttcatcacttctagttctacatatgttatatatggatttcaaagcttcgttgcaaccagtcggttacagtttgcgaatgaatggcttagtgtgaaaataatataaaaagagtagtgactactagtgctaaatcaaatcttattaactttggttgtaatgatgcgtataaacaggaagatcgatcttaacgtaaaatctgacgagtaagatactaacatatacacaaagaaacatgagaagcactcgcaatggttacgatcaaattattcatcttagtgcctcccacgcaagatgtgtttttgtgcctgcgtaaaatcaagttt

SEQ ID NO: 29843 - DNA, 492 bp, Arabidopsis thaliana columbia
tggatttttagactctgaagtagacgcttttgtcttctctgtacgtatataatacgttcttattttgacttttatttggcgtttttttccaatttcgttttaaaaattccaaaggtagctaacttttggcactcaactgcgacaagctgttcaaaaatgatacatctgttacatatgatttattaaactaagacatttttataatatatgtattcagatattgattataacgtccaaaagaaaaacagagatgctctgatttttataacccaagaaatacgttacctgacgttaataattgcctaacaaacgattaggcccaacaaaaaaacgtcttataagttaaaactttggtttgggtcaatgcttcatatgattggtcctcagttgggctacaaaagggacacgtgtcaagatcagacggcggttctcaaagcaacccggcaatttccatggaaacagaggtatgccaacatagtaagtaccgtagag

SEQ ID NO: 29844 - DNA, 504 bp, Arabidopsis thaliana columbia
gtgataatttactcttcgttgccggtttcgtcgtcgtcatctgagaaaggttatgctccggattgaatccgtcggaagcgtcgtcgtcgggtgaaagttttctgatttttcgaggacggagagggatcttggtaggtggagacgatacattgcctaattcagtgacttgtggtgcttcaatggtggttgatgagacgattgagccagaaactccggcggatgaggcggagtcgtcatcgttggtttccggtggaattggattaggggtttcgtgattgggtgattccggttggtttggaggaagagtatgagatgatggttgagaaggtgaatgttcacccatgtgaaattgaagatttcgaattgatagaattagggtttttggtcgcttcagagacgaagacgaagagaatcgaaaacctaatcggagaattagccacgaccgagtgaagttgcgtctcgggtcttgacgttaattcttctctaacgcgcttttcatgagag

SEQ ID NO: 29845 - DNA, 558 bp, Arabidopsis thaliana columbia
tcatgggtaatgagagtggctgagatagagaaagaatggttttatagaggcgagagagagagagaatagaaaaagcaaaaaaaactaacgtctcgaaactattatgatatatttaaataatgagaaatacagggaatcatggataacgatgatcttcgtaaaagcatatttatttacgttaataattgtaatagcctactacttgatgatgtttaatcatgtaacacaacccacgcttatactaattctgttgcgttggctaactattagtattatattctgaaactccttataaagatagcatgtttgacctaatttattctcaaatgccttgctacaggagtactactcagtcagcagttagaaatgtaaaaaaaaatattacagtgccagaaaactcacaaaggactaactttttgactagtcgacgaattaataatttacttccgacctgttggagaagaaaaggaaaagaagtgtgtggaaagcgattgctttatgtaaagtaacatagtctcgaacattgtgcagggcctagagtatttttaaaatgtttaa

SEQ ID NO: 29846 - DNA, 463 bp, Arabidopsis thaliana columbia
taacaaattttagttatccttcatttttttttaaatgatttaaggggactacttctacgaggaaagactccgtctgtgacaaagccacagaggctcaacaaaaggtatcctagctattttcctaaagtttaaaagaagaagaagaagaactgtggccttaatgttttaaacatcattttttgcaatgtgcatttgcgtttacatgtcaaatttgtgtttgaatattttaagtatagtttgtatttgacttttacatttataactaccacatagattttgttttaatttttgaaatagttagttataatatatagattgtaaatttgtaacaaacaatattaaaagaaaaaatctgttttgtttctttatttgtaattgtctttacatttggttttatgcttccgttatcaaactaaacatgattggtgtaggtggccagaaggcagacgaaggggcacagacg

SEQ ID NO: 29847 - DNA, 1004 bp, Arabidopsis thaliana columbia
gtttgttactcatggagttaacgtttccaggttaaaacttctcagaattttgtgccagaaaatttgagattgagcctgttgaagttacatacgacgatggaaagtcatacatctatccggatttagctgtctatgatatggaagttcctctctctttcattacagactcaattggagtctctttaaaggtggaacaggtaataaagacatcactgttgtcaatttgtaatggttgaaccagcctcattttcttatttgagatgtcgattttagaggctactgtgcaatgattttaatcatttgttatgtgaaatggattttgtacctttcaggttacaagtctgctgacccgaatgcagctgcaagctgagcaagcaaaatctagtgataaccagtgtgccatcaaagtacatgtaccccccagcaggagcgacgttctccacccttgtgatgttatggaggtatattttcatagctaaaacccttctgtgttggtgacataatgccattatgatgattctccatataactaatcattttgcttgtatttcaccaggatgttgccattgcctatggtttcaataacattccaacaagaaagcctgcttcgataaaaccactgactttgaatgagctcactgatcttctaagaatagaggtatttgcacttccatttaactgttgcatcagctcacagagatctgtgtctgtgtttcttgttaaattacttttaagcatttgtttctcagggaaattatctagtacatatattgaacttagattgcgatgtgtgtatacacggaagtggtaacgtggctactatgctcacataaggaaaactttgcgatgctaaatagagaggatgttaattcagccgtcatagttgggacccgcggtctgctgattatgaggttcctccaaataatttggtcatacggttgtaacttttccaatggtaatgccttgctaattggttcagtatatggtgaaataggccatgagga

SEQ ID NO: 29848 - DNA, 133 bp, Arabidopsis thaliana columbia
ggatgtcgagaaacaccaggtcgggcttgtgggcctgggtcagctcgacggcttcgaggccattcttggcctcggccacgatctccagctcgggccagacctcggtgaggcggctgcgcactgctcgcgcatc

SEQ ID NO: 29849 - DNA, 540 bp, Arabidopsis thaliana columbia
ttaataaaatttataggaaaaaagaaaaaatttaaaaataagaaacaagaggtaggctcttctagcgaactcctttcatacgttttctctctactctcatcgcttttcttatctctctcggagctcttccgtcgtccaccattgattacggtaagattcaccttctcctactcaatttcataactatagataaataaatctctgtcttctctgcctctgttagtttttttctacgattgaaaccatcaaatcaattcaaggttttacacagtttcttatgcttgtcctgattgtttcgttcccggagagggagaaattacggcttttggaatccgcccagaaaatttcccgcccagctcggattttgatagaaatgttttgcctttttggtttctgtaaaattgatattcttattgtactttgattgaagtatgtgtgttcaattgaaattgatgttgtgtatttcttaagtttgaatctttgtgtaaggattgggggtttagggttttgactcatgattgctttctgcatttttaaagt

SEQ ID NO: 29850 - DNA, 540 bp, Arabidopsis thaliana columbia
gaagatttgagagtatttgactttgaaaacctggagttgaatcatattgaccaaaagattatagtggtcctacaatccctaaatatgagaaaattttaattataaccaaattgtgttagagaagtaattttaattctaaccaaattgggtaatctactaaatttaattctaacaaaactgtgtaatcgactaacaagaccatagaccagaactcactaaagctgtacataattactacgatgctaattgtagattaactttttccattgttgtaaaacagaggcctaccaacaattttcgaatctaaagtaataattttctatactttggttctaaaaaccaatatgtcaaaactgtgagaattccaaaagtaatttgtgcatagacttcagaacagcttttgtccaaaaaaaaaaggacttcagaacagatttgaaggcgtatcaatttcaaacgcaatccgaaataggttgcagcgtgtcccttttgactaattttaagcacaattttgaagcaaatttgtgagtaaaggtgtagagt

SEQ ID NO: 29851 - DNA, 637 bp, Arabidopsis thaliana columbia
ctggaacttcaaagcagtttcagcttccttaaaaatatcaacagaagctgtatatcagatttaaaggctcgcagaaaaacgctaccagatctttggtacaaagatatgatatagtgaagacaacaaaactagaagggacaagcaggaggggagcggttgatacttactgcaattataaactctgtggtttcgcttgcacggatgaaacaatagcaatgaattaatggaagaggtcctttccaatacttcttttgaataacattactgaacgaatctgcaaaaacaattacagagcttatatgcattagtagtgtgacaaaaacaaatcctgacttcctttcttacttctaactgaaattgaagagccaatcacataactcttcaaacaagccttaatacatgatgcatctcctatttctattggtcctggtcctaattaacttgctgatgcggaatgtagttgatagttgatgaaactctaatgccttgcaagtatatgcaagactctagtcccaaattttgaacaaaaataataaagaatcattgatagcataccaagaaactgcaaggcagatgctggaaggttcataataacatggtcgatatgtcccacggctttgcgattggaagcacgttt

SEQ ID NO: 29852 - DNA, 526 bp, Arabidopsis thaliana columbia
attctgcaggaaaatatattacaatgacttctaatcgaagtctttctttatgttatcataattaaataagacttttgaataccaccatgtattaagttattaaactcacaaacctttagtgggtgctggtggattgtggaagtttatgagcacttttaatggcgaaactttgtcaaaaactaatagtcaaattgaacaaactaatagtacttactacaagcatgagatggattatactaatattcataggactagtggagttagtgttgtttaacatgaacgctgaagaacaagctctagtaaaaagacatttatcttctttcaataataaagtactcgtagtacaactaaaaatcttacacaacaagctccaactgtcaaaacctcacaaattgagaaacttcatcaaagtctcctaacgagtctacttaacgaggaggagagacaggcacattagctttcgcgaaactgatccaagcaacaacaccaatggctagaatccccatcccatagcatcatacttggc

SEQ ID NO: 29853 - DNA, 513 bp, Arabidopsis thaliana columbia
cgaacctaattagcgactttttcgttcgttaataattgccatgtcttttaattaatattgctacaaaacctaccatcactattttcacattccactgctatttagctgagtgaaacctaatcgtctttcacttacctactacaagcacttctgaaataatactaatacgttacctaacaatttcttttggtgttaatatatattccaaaacaacactttcaccaaacttttttcaaaaatgaaatgttaacttaattaatcaccaaaaagagagttatatacaaaacaagtggaaaagattcctaaacattagattagaaacatctagctcaaatccatcgaaactagcactaacctctagatcattcattacaaacgtttgatttgtttcaatagcaatttctgctcttatatgaaaaaagaaaaacactttttaagaaaagtaaatcatactttataaacataaaatagttttagttgttcgaaagataatacttttgtaaaagtataaat

SEQ ID NO: 29854 - DNA, 594 bp, Arabidopsis thaliana columbia
ttttaattataaggtaagtctcctaagatatatgttttgggttaaagtattcacaatgtccaccatgttatgtgatatattacccatgtatattcattttgtcatttaatcttacctttttgcatttttgtttggcttaaaatctacaatatcgttttactattaaaaaaacctgtaatattcatttacaaatcaatattttattctttttagacatatcctattttaatttctacattcttttcaaaatagttactaaaataatttttttctaaaagccatgaatataaacacaacaactaatcaatctccacaatatatattatatattaacaaaaagtgtattggtgataaaaagtacttgatgatacactaaacaaaaaggataaatgggagaattttttattttgaaagatgaaacattttaggttatatatttcatgacccttataaataaaattcctggctccaccacctggatatctctacatatttccaacatcaatatccattgatatttgataatctttaccaaaaattcgcaatctcctttagagtgaaagcgagtataaccgtatgaccaactattttgag

SEQ ID NO: 29855 - DNA, 411 bp, Arabidopsis thaliana columbia
tgtcagaattatttatctctttccatatcgtttttgtcttaccttgagttggacctttgttgtattcgtttataccgatccatttaaaagaaaaacaaagcaacataatcatcttggagtttacccaagaaaacaaaattcttggagtttgaaataggttaagattcaggcgtgtccaactacatattaaatttatttatgggccattttgtaatgttggccttttgttcttaaactgggccattttactgataatagaccaaagttggtgcaatggctcgagcttacccatttgtttttcgtatgaggacatcctattggattagattttttcccactgaccaaataataaatttatagtattttgttgtatataaatccaaattaatagagaatatttagtctcccagc

SEQ ID NO: 29856 - DNA, 443 bp, Arabidopsis thaliana columbia
acatcaagtctgtggctttagaggacaaaacgacgattctgcagtgcctcatttgcagcagcaacaaggacaggtgtttagtggtgtagtggaaatcaattcttcgtcatctgttggagctgttaaggaagagtttgaggaagaatgttcggggaagaggtagtcttttaagaatttgaataccttgctctttacttttctttgttctgatgatttgaaagatgttgtgttttctgtggtgtgtttagattgaattaagatatttgcagctaatgatttcacttggtctccactagtttaaggtcttgaattgagtctttaagttatgtagcttggattggccatggttatcttgttgtttggttatctaccagacaactatagcatccatttcgttgtttgatgtgattatgtatgaccaggagacgaactggatcatgtag

SEQ ID NO: 29857 - DNA, 461 bp, Arabidopsis thaliana columbia
ggcagagaaaggatttttgcccaaattattaaacacgcaaaaggcgtgtaaaactgtagattaatacagaatgtagcaagttcgtggaaaataatcatcttcgaaaaatactttgttttatagccaaaatatgtaaacaatagtttttaatatctagatacaagaacttggtttttcttagccctacatgttcatatgaaagctgcaaagcctcaaacaaatatcttgtaatgtttttctctccgaaatgattatcgtgagtcatatcacctcatttccgtcacgcaaggtaggtacaattcccaatcaatcaccccaactgtgtaacacagcaaaccgtaaccataacaagacatttgactctccataacatgtaaccactttaggaccccaaaagacaagaagacaaacactcacgtttggtttagagtggggtgctattagtggatgtgatcgagaag

SEQ ID NO: 29858 - DNA, 412 bp, Arabidopsis thaliana columbia
gatcgtctctataagtgattttcttcctagtgagtgtgaggagtcaagatagagattttaaacaagctcacttggtgaggaagtcccatgtttatctttgtacatatttataatattccttggtgttgtttgatgcattttgttagtgttttcaggagataagtatgaagagctgtgggaaatggatttaggctttgacggaacagcaatacacttgaccaccaagcaatcaaagacactcaaccttgttttggctactccatgccaggaaattactcgaccgccttgctggccgcaatagaagaagagagcagtatattcggatcacatcctacagggatcgagaaaaatgtgatcgagtacagatgaggcgatcatgacttccacatgtcaggaattcgctcgagggcgg

SEQ ID NO: 29859 - DNA, 441 bp, Arabidopsis thaliana columbia
tgtgtatgtatatcaatgatcgaacggtcgtcagctcactgtgaggcaacacatgaatccaattagttctcaaaatttatccattatccacaattccacataatggttagcgatattcatataaactctcttcataatgatttttttgttgaaaaaacttctgatactacgacatgcaaattagaagcagtattaagaaacttacttttttttttgacacactatttaagaaactacttaagagttaagagttaagactgaagcttaattaaaataacgtcaataaaatcatattttgtttaaattatttccgtttttgggcaaataattaaattatttcctaaccagtttaagtttcgtaatgcaaaatggaatctctaatgttgctgggtcaagttttcttctacgtagaaaagagtttttgtattgatccccaaagcc

SEQ ID NO: 29860 - DNA, 581 bp, Arabidopsis thaliana columbia
cttgcattgctctctctagccctcctgaatcagctgcttcaagcccaacttcttttcttcttattgactttccttcttctctcggtcgttgactctcttcttcttcttcctcttcttgttcttattgatttcaattttctttgtgcaggttcaatgaaggatttcaacttcaacagtccagccatcgaaacattagccgccgtctacataatccaccggtgaaagtgtagtggtggagatcatgtgaaattagggtctgactgtagaagtagtcacaggatactgaattgcaaaagatagaatggcgataaatgtaagaaacgtgacgatcggtcttcagattacaagattaccgacagattatcacgaacctctcttcgctatcctctttttcctcgtagtctccggttaaagctttacggtggctagatcatcattatccggtgaacgagagagggttgacgtacggagatcatcattcaatcaataaaacgatgctttcacgccgatcaatggatgaaacgatgcgctctgatcaatctaactcttacggattgtcggatcatgttgcagagatgatg

SEQ ID NO: 29861 - DNA, 521 bp, Arabidopsis thaliana columbia
gttggtagagagcttagtgttctacgcagttgacgactcagtattctcggaccactagtgaaagacttccaatcgcatggttttctaaatttggtctttgataacatgtttcttcttccttgaggttttatttgtgagaatcttcaaaatctcttatagcttcattgactccgaaaacattactgaaatcacctatattttgtccatgtcaatgttctgaatgttattttttcatgtttttgttttttgttgtaaccatgagaccaatctgtatgtttttttttattttattgtaggtttttacattttctgcgatttttttttttgtatattctgaatacaaataatttctatcccaccagtcaataaaccgaaattatagaattcaagtgctatcacaatagtctataccttcataaaattgaatctatatagaatttgctgatataatagtttttgagcctatatatactacaaatgttcttaaacagtatcacaagcaccaaatcacaaagtagtaa

SEQ ID NO: 29862 - DNA, 280 bp, Arabidopsis thaliana columbia
actctagagatatttataatactaaataagtagagcgccaattttggtattctgccaaattaaaattctgaaattcgtacagatttccgatttactgttggaaatatccgatatttttaaatgaacatattttcgtcggacaattttattaccaagagcgagtgaacatctgcgcacaacctaaaatcactagaaaaaaagataacagtgcggcttttctaccgaatctcgacaaagatcaatttggcaaaattctaaggatggaccgacaaaactatgt

SEQ ID NO: 29863 - DNA, 297 bp, Arabidopsis thaliana columbia
cgttgatttgtaatgggactatataaaaataaaaacgatgatcttgagggccccttcttccatctttgtagggttcttcgtgcagaggataaggttagctgtggttttttaattatatttttctaccgttgtagggtttcctcactttcctatatccactgttctttagttctcaatctgtcaaattcaaacagattacatcgttacgtcatagaatcagtagaaactcaacattttgactatatcctacttgaagcaattcttcggctgaattcgaagtattgtggcattcagata

SEQ ID NO: 29864 - DNA, 491 bp, Arabidopsis thaliana columbia
attattacaagtatgcaaatctcttttctctctatgtgacatttaaataagtaagtaaataacgatttttaacaatcactagagattataaagttaggtaaatacatatttggtcgtagaataaaccagccaaatcagggcttacaagcacaaaatataatacttcatacccgaaatttttaaagatgggacacaatcatttggaggtctttgacatgtacatgcatgttcctctttatgtgtgttgggtttccaatccacgtcctcatgctcaacatttttgtgcatcaaattcggtttgtgtgggttagaagtagaaatcattattatgcaattgtaaaatgactaaaatctatgagtgtaatcttgcttttcaaaactttgattaaaatcacatttccactaaattttaacacaaaatgacgattttaacatttaattattttgagaaaatctcatgattccattattttgcgggaaaatctactttg

SEQ ID NO: 29865 - DNA, 584 bp, Arabidopsis thaliana columbia
ctgataggatcttgtgttgttgttatgagacataatgacaaagaaagaacaaaggtgtaaccatttcaagacagaattataggctctgttgtttctgaaagttacaatggtgattggtgacacttttacatattttgttgtcaacagaggaaacatagggaatttgatctcgtcgtgtcacgacggtcttctagacctttcaagaaccatctcaccgcgaggtgctctgaagcataagtcatgaaggcagctagaattatggctagacccaccattagacccaacctgttcaatatgtgataaaccagcaactataaggacaagaatgtgttgaatcaataacaagaacctttctttcacgagttgattaagaaaatttacctcgtgaataaagcagtgatccccaaaatgtaaggtaaagaaactgcagcaatagccagaaaagccatccctaatccataatacaatgtagtaacgtcacaagacccacctgctcgctgatgaactattgagacaagaaaaatggtcttagtcccaactttgtagagaatggtacgattaccgattatcacaatttgttgttt

SEQ ID NO: 29866 - DNA, 576 bp, Arabidopsis thaliana columbia
ttgcattatctatttcaaaaacctgatttttttttttataaaaaagattcatttcttcatgtcattattctcaagtgaatctagcatcttgatttatatcatagaagaggcaatatacaatttctctctaattactggatcactcgaattttcaaataatcaaattttaatccaatgcgaatcttagcatcttagatgaggtaaaaagttgatcaaaaaggatcttcgatataatggatcaagaataaaatgaagcttctataccaaacaaaacacaaaacaaaacaaaacgacagctttgatgatgttgtccatataatgagagatgaggaaagaaagaaaccttgggcgtagggctgagcaggctgaggataaccggtggcgggaggctgctgctgcggtggatagttagagacgccttgaaacggaggaggaggctgttgttgatgttgatgatctgtcaccacagatctgtttttatcgtcgccaccgctcgtcatctctcaacagatcaaactaaacaaaaaaacagatgtttctctgttttctttgatctggagacggtggtgaacaaga

SEQ ID NO: 29867 - DNA, 211 bp, Arabidopsis thaliana columbia
tagaggattaaatcagttacagataatagaaagaaaaaaaaaagaaaaaaaaaagtaatgaagtaagagtgtagttgacacacaaacacaaaatggtcagaaaagtatgatcaattatgaaaatagcacaataaaatgaagggtattgtatgattaaacattttacacatgtcttacgcgaatgtgtacttctattaccttttattgacga

SEQ ID NO: 29868 - DNA, 533 bp, Arabidopsis thaliana columbia
taagtgattctgcataaggacgtctagtatgtgtgtacaatgtgattcgaagtaattccggtatgtgtgtgcttgttttgttttgcatcttagattttggccggtagtatatgtagagatcctggtatgtatgtgcgtgtttgcttgttttggttctgcatctttgatattgcctgttgtataaaatcttcaaaggaataggagtcttagaacgcctaaaaactgtgtccagttagttagttagtgaaagagaagctacatgttaaatattcgctgtggtatatcattttggcttttgcagcgattgctgctgatgtccatgctagctcttttcttgatagttctgaggtagaatctatggctcgagctgaattagtatttctggatttcttagtgattagtgaaaagttcagttgctgagtgtcacttgtcttacctgactgaggtttatgtgcaacagtcgattcctgattcaattgctggattgcatagtcttgttgaactggatgtctcccgaattctctggagacatt

SEQ ID NO: 29869 - DNA, 810 bp, Arabidopsis thaliana columbia
accaactccctgtttcacagttgaagaggggtaaacaaaagttgaagaacgcttcaaatagcattgattgtttgttttgagtgcagccataaaaggatcaagatgagaaagattacctgggagtttgttacgtagacatctgctgcggagtataatgaggcaacacgagtggtcgctggagtccacagaaccgagttcgataagtttccattgtttgacaagaagctcaacatctccttaacgtatgctactttgttgctcttggacccaactgatccaagaagaagtttaaggtcttgtttctgtgttacgttgccagacaacagcagctttcttctaccggtggcagagagaactgatggatgattgtcaacagcaggagacgtaattttcatcttccgtgatgaacctcttaaacgatgtctggcagaaagactaatcttttctttcctgatgccattgaggttcttgattattttggactgattacgtttagctacttgctcttgtgtttgttctctctccagtgccaaggcgacagattcaagtagaagaagttgtccctttcccgggtttatgctgctaagagacatcacaagcatatccttatcagtcaaaccgaactccgttctgactgattcacgtagcttttgtcttttctccttcatagtctcctgggtcagtgttggagtatttagtgaagaggataccccagcaacaaaagctaactcatcattaacagacagcggaacaataactggctgagacctaagctttacatggtcctcttcacaccatgttaaccattgt

SEQ ID NO: 29870 - DNA, 543 bp, Arabidopsis thaliana columbia
ctttcttctctcactcttactctgtctttcttcatcagaccaaaaacaaaccctaatttctcagctcgatttctctcttactccatttctcaatccttcacaaaatgcaccaacttccatttccgagatcgtaaaaaagcttgtggtactttctgataatagagagggaaaaaacgagagagagagaaaacacaaaatgctggaagctccggtgaacaagtcaagcatcctcaatggaggaggaggaggattctctcagctacagagttgcttcggcgattgcagtagcgaagaagaattgtcagtgttgccacgtcataccaaagttgtcgttactggaaacaaccgtaccaaatctgttctcgtcggtcttcaaggcgtcgttaagaaagccgtcggactcggtggttggcattggctggtgagcaaagatcaacttcgctttcttctttacctcgttttgtcttttttgcatctttgtgtctgtctgtgtttttatcccccagtagagtagatttttaaaaactgattacaaaagatcag

SEQ ID NO: 29871 - DNA, 490 bp, Arabidopsis thaliana columbia
tacaaaaagccttattcaagattgtaaccaaataaccaaatattcaagattgtaaccattactatttcaagcagccttattttttaattatacaaaaaaaataatcaataacagtcagtcttctcaagaacccaacacattgttttggagagaacaaaattaaaaagaatacaaactctttaatgcgtttggttttagaattgagtacaacacttaacttagaagttgacaacaatctaataagcccattatatttctcaaggttagattggtccattttaatggtttgaaagcccatataaaacttatcaaagcccatctgacccagaaaccttcaaaaccctaattctcactgtgagaaacggcagcgtttaagtaacttttaatatctcatatataaactcatgcacacaacgctccacctcttcagcacaaaaaaaccctaatttcttcacaaattcagcggcgatgaagttcaatccgcgtgtga

SEQ ID NO: 29872 - DNA, 382 bp, Arabidopsis thaliana columbia
gttcatgaattccgggatcatcgacttaaaagataagctgacaaggcttccattattaaacctaaaaaacaggaaagataaaacgattcacatgctttggtaagaagaaattagcctcaattacgttaaaatcaatccaacgacaactccaatccgcaacttcaaatccgatttttaaaattgagaaaattagcttgaaaatcgaattaagctctttaaacaaagaaggatcagagaattatgcagtcaaatcaaaggattaaaacgcaaactaaatccaaacaaactaaagcaaaatgaatcgagagaaaacgaaaataaaaacaaaaccccaaagccagccaaccgtcgcttaagaagccgacggatgacagaagcaagc

SEQ ID NO: 29873 - DNA, 461 bp, Arabidopsis thaliana columbia
tcgacgatatcaacatttccagcacattcaaaatcagttacttggtatcaatttgatgtatcatccccttataaaaccgagtttgaacatcgagaatgagcatcgaatgtatcgttgatcatggctctgtccagcatgtttgataacaccaccatagtccataggtataatgatagaaaatcgtcctagcagactctttttctccataaataatatccaaataacttcaactatatcatagttgctacgatattcatatccagaatccgatatcaagaatttgggaaacaaaatccgaacctatgatatgaaagtagtcaaacgtacatagatcattgatgtcacgaaaaaagtcaaaatcccgaacacataggaccgtgggaaatgtcattctccttgattcaccaaaggacaccttaaagttcacgaattcactcacttacttccattccatctcaaac

SEQ ID NO: 29874 - DNA, 796 bp, Arabidopsis thaliana columbia
catcccttggagtgaatttaagaattgttcttccaaaacttttgcattgtatccctttcaaatttatataattatccatttgaatttttttaatttatcaatatggcataagatacacaaattattaaaaaaaaatccttcactacttctttttaaataatatctcaatttttcctacaattatataaatttcaaaattatctaaaatactcattttttatattaatttagcttagaggttgaatagtagttttgactatcttgattgttcgaacccaacttattatccaagtttttttcgtcttggttttagtttaaaatattcaaacaatttctcctctgtttttgttataattcaagtctaaaaaataatctaggcctaaatattatttttaagacctgaagaacaacgttaaaattcgaatcctaacaattaatgttactcgagctcaggtggatgagactgttctttgcttttataatattccgttttttaaaatatggtggtggatgcggtaattgtaaaagaaaatatttggtcatctatgtcaccaaagtatatttatctttggttaaatatgctgagagaactccactgttaagcatatttgggctggagtaactttaaaatagtgaccttccaaaaaatgattgtcgaaactatgcgaatgaagagaaagcattaagaaagatcatctggtgatttgtagggtcggtaaacaactctttaaaatatttcgaatgtaacaatgtaccatcggacaggggtgggtccatgggtctgagagaagatgta

SEQ ID NO: 29875 - DNA, 1046 bp, Arabidopsis thaliana columbia
gtcaagtttcttcaggaaagacctaagacaatgaggagctgcacagatgaagatcccttccatcatcttgattgtttgaatcttctgaatccgctcatcacatctgtgcagtaatcacacacacaagagacaacaagatttcagtctgataatcgctacgcctagtaaatcttaaaatgtctctgtagattactaaacaatctagaatatctctatcaaagcttctaatgaaattcgaagcctagttcaaactatgataatcctgcgtctctgtagattaccaaacaatctaaagtatctctatcaaagcttctaatgaaattcgatgagagttaaagatggttacagatagcagatggaatcactgcgagcacattcaaggcaaaaggcatgatcacaaggaatctgcaaaaccaaaacaaaacaaaaaaagtttcaatcacatatagaagaagagcccccttaaaaaaactctttaaggcaaatcaatatagccataaaccaatgaaggaagcgaagttttttaccagacgaccatagattgcaatcggaaaatcgcaacgaacgcagaagtgaactctctcgcctagctgacggcgagaacgacgaccgacgggcttgattacggtggtgggagtcacggaaccgattcctttcgcaacaggaagatcggcgaggacgagatggtcgggacaggctacagtaaccgtctccgtcggagaaggcctcgcaccatttccagtttccgtcggggaatccctccgaagacgaatttgaagcattgtcgctgtaaaagttacatgaacggaaccctaagaaatacaaatcaaaagaaagaataggaatcaaaagcttctctagttaccaagttaaatcggagattgagatttcagatctctctctctacttcagttcttctcaagaatcacgccggagccgaaaacggcgaacgaaattttgtttttgtgggcaacggaggagaatagaagccttcaagtcttctggctgagaaagagggtttcattaattacttcaagtcttatttt

SEQ ID NO: 29876 - DNA, 483 bp, Arabidopsis thaliana columbia
tgaaactggcagaagtttaactgattcttgatcacaataaaacctcattgtatctagtgaagtaacctagagcctaagtacaatcttaaccctcttcaattctacctaccattttatgaacttaacaagagaagagtgattaaaaagagcaaaaaacaagaaaagatattgaactttgtaaggcataattctacgttatatatgcagaaacagaagttccatgccaacaaggcacatatgactataagaaaattgattaatttcaaatgcttaaagagtttagtttttagcttccagatttcatagttccagtggtcagcgatcacaattggcaccaacaagcttcccagttttgaatagtggccaagagaaaatcttgatgctaattccataatctcccaataaacctatcaattgtagtacctgttcagcaatgccggctgcttcagcatatgcatcctgtatgttctcagcaagtctgtg

SEQ ID NO: 29877 - DNA, 627 bp, Arabidopsis thaliana columbia
ttcaatcatctgataatgctttacttctgttcgaattttgctgatgacaactacactgatgtctgagctgaagaaaaatgtactcaagataacctttggcagggtgagagatagtcctcctgatcttgtgagattaattatgttcctatcatgtttgtttcttttatggttgatttctatatagtttcttcatctcctaatagatgaagctagtaatagatctttagagtttagagaaattggaatgtgtgcctaatccttagacattctgatcattacttcgcaagaaacttctccaaaaaagtagaaactgatcgagtgctgaagctaataggaaaaaataaccagaaggtgcctggtagattctcacttcatgtctagatgatgttgatatgttctagtaggtgcattgcttccattatgttaatcttctttgaaccctgaaaacatgctatgcagaatggaacaatatgtgtggactccaaagtggatttggtaaagttccctggcttgaggattttagctatgcgaatgatactgctgctttgcaggaacatggcagggtaaatctgggtcttggacagacatgtaaccatgaagagttcaagcgatttagttcattcctct

SEQ ID NO: 29878 - DNA, 523 bp, Arabidopsis thaliana columbia
gtcaaatgattatataaactatatatgcaattatagttttggtttgtgtttggttaaagatgagagattacatatgtattacagtattagagtcctcaccatgtcatgattgagtctctaaacgctcctgatataatctcgtactaattctctcttgtaatatgtatatctcttgtggtacaaaaaatatatatataactcttaagtaaatcatgtaatgtaagatatttaattaaagatataatgtgtcaattgtcggtgtatatgacgttcgtcttaatgaaacatcaaattttatgagtagatgttagatatagaacattggtttcattgaccaatattggtttattcctctagcttcaattattctgtttctgtaatgccaaggtgtgcatcaagacaaaacaagaaacactgtgctaaaagctggaacccgtaattcaggactagtacacaaacacaactactcgttgcattattttcttctcaagtagtttgtcttcttccattccaacttgttcaa

SEQ ID NO: 29879 - DNA, 492 bp, Arabidopsis thaliana columbia
aaggcttcaaaacctattatcatctgcaaaatatgatgtcgccaatattgcaacatcaataaccaaaattatgattgttgttcgcatgccgatatgattcaatacaacgatgcaaaaattgttagtgtcgttggacttagtcattagactgagtcttagtagtgggaataagatgcttgattgtaggagtaattgagttgtagtttgtttcatcgtgtcaaagtcctccgagaaagtaggaggcagttgtatttgagttttggctatttaacgcctcacaaataatgagaaaagcagagttgcagtctcaccattcagttctatattctctgttattaacaaaaatctcatcttttgtatcaatttttttttaatattttattttctatgttatctccaacccttcgaatcaaacaatgtcaatccctccgcctccagcccgtttttggaacttaatgcatcatttttagcatatgatataagtatgttgat

SEQ ID NO: 29880 - DNA, 357 bp, Arabidopsis thaliana columbia
  unsure (1)..(357): unsure at all n locations
cgttagtaggattttccgtggaagcgaagatacaataggccggaaactcttctggaattgtgactagcttatggagaagatataaggtagactggctgaagcaacagcggccaagttgatactcatgtttttccaaggtaagcccactcgctattgttatatgataagggtttactctttatagacctaaccatgttttgtgtatgaagaaattgaattggactctccaaagagccttgaaatcggataaggtgggggtacgatagcacctcaagatgcatgcaaccgaattgctgaagttgtaaaggaaacactgaggaaaatggagatagtgggtgagganaagacgaggatgta

SEQ ID NO: 29881 - DNA, 505 bp, Arabidopsis thaliana columbia
gcatattatagcttaaaagaggaaaaaacaatatacgatctttcatcttataaatgtatgacaagttgagttacaaaaagtaaatgtttagaccgtatatacttattaattaaaagccgaaaaagattggtccccttgtgaaagagatagactaagaaggctccttataagagcatctaaatatgatttttgtgacaccgaaaaaaatcttttttccatctcccaattttcatgtgcattgctttgttccctcaccatcactccaccccatttatttccccacctatagatatatacattaaatttatttcataaacttgtatctatagatagtcatatcttcacattaccataatatagaaggtctctttttaccactatccaaagtccccacaatctttatcatctttttatatattttggatctcaactctagcccttttctattggttccaaaatttattatagacatatagtaaaaacaaatgttaaatactttggacgt

SEQ ID NO: 29882 - DNA, 297 bp, Arabidopsis thaliana columbia
cttcatcctccgcttctcctgattcttagggtttccgcttccgcttctctgtcgagggtttttcgagctggattctctgctcctgcgccgctggtgcagcggctttgttgattgatctggatttctccgtcttcctttctattttattttctgtatctcgcacaatccaaacaaaaaagctagggctgaggattagatttgcgtgatttctgggggtgtgttaattcgggggtgtgttctccgatttggatggcattaggagacttaatgctgtctcggttctcgcaatcttctgtt

SEQ ID NO: 29883 - DNA, 544 bp, Arabidopsis thaliana columbia
gcttatgtcattgtaattgcacttatcttgttgatatcattcattttatatataacttgcgacctaaccaatgctttggagttcgtgggtgattaatatactcatgccaaaaccaataattaatttcttgacacgtaatacccgcagcaactgagctgtcgcatgacaagccaaaaaaccatcaagtttaaagaaacaaaatccaccaagatgagatttttaactcgcaaagatttttgttctttgggatgtaacattaaatagtagacgacagattttatgcgaaatacaaaaactttgagaaaatagttttaaaaaagacatattgtacccctccaggtaaaaaagatctagtccaacacctataaactttgaaaactctactagcattaaactttggacattactatgtctcgcataatcgcctttaggaatgctaaggacaaaaacatgttttacagttattgtctgtgagcagtagtttcatgtggctgctgtttattacgaaaccggtcggtgctgaattagagacacggacgggtga

SEQ ID NO: 29884 - DNA, 585 bp, Arabidopsis thaliana columbia
tttaattgtctcattttgcaaattcttaaaaatctgtcaagtgtttgcgatacaaatgaatcggaggagagagtaaagggtaaataaaatagagactggtttacttcttcttcttcgtgtacgagtaggtttttcctgcgattctcatcgagttttggttagtgctttgttatcaaggtgaaaatcgatttgaagatggcgagctaaagtcctaatgttggtgttgtagctcccgtgatggagaatggtggcgctgagtcctctaatggtaaagaggaacaattggaatctgagattttgaagaagcttgagattacaaagatggtcaagaggagaacgatggagaagaaggaagcaaaggtgaataaattgattagctcttttttgggggttttgattgatcacttggtttagtatttgcgtctttaatttatgtaccattaagaaaaaatatgatcgtttgtgttattgattagtagattatgacaaatttggagtttaggaatgttacagtgatgatttttggaattagtttcagatgttgttttcgcactttttgttggtcttttctgatagaggctagtg

SEQ ID NO: 29885 - DNA, 509 bp, Arabidopsis thaliana columbia
gaagtcagttctttgacccagtgcagtctagacacttaatatgtagttagaaaaaggtcatggcagcattttatatctggatacagaataagttttacatatgatgggtcagattgaaaattaaggatttcaacctcagtgtgaaatctttcgatttccttagatacagtccttatttgcatatttagcttcaaaaattaaagctaaattatatctgtggcattttggctgttagacgtaattgtggaggcacaaccgcagagatagcacatcattaaagtctataactttatcttttctctatttcaagacttgattgcttccatctcaagtcacacgaaaataaattggtgatagtataccttttagaatatgttactttttctcaggtgtacaagactatctgtttttcatatggcataattccttttcatgttgtaaaacaggggaatacagaagctttaataaagaattcataattgcatctcaatttaggtagttttttggga

SEQ ID NO: 29886 - DNA, 317 bp, Arabidopsis thaliana columbia
atgtttataatgtttacttagtaaagttagatctatcttatgtagttataaaattagattcatcttggctcaagatgacaactaaacatttcttgcaagtgaaactatagactaaaattaaattgtcatcatggaggagattttggtggaaagatcacattgtgaccaaaatgttttgcattacatgtctcatgtgtagtatcttgaaaatgaaccagaaagatcatgtaatcgtcccaatgttaaaacttttaacacacatatcaattctaaaaacagaacaccggtttgtagaagagaccgtaagaccctcatga

SEQ ID NO: 29887 - DNA, 433 bp, Arabidopsis thaliana columbia
catagcttgcctggaagttactgaaaaaaaaataggtaaaaaaatcttttaggtatagttttggagatgaggagcaaagctgattattagatgattaacaatcaccaacaaagaaaatgaaaaaaactacaagcgaactctttatatgctcgaaagcaagtctcaaacataacatattaatgaggaaagtctatcacattagtgaagagcgaagtgactagatacagctcggttttagttgatcttataaaccgaaatcaaacaaaaccaaaccaattaatgccctaggttccgatctctatatatcggctctcttcgtgtgtgattggttcgtctgtcactgtagattttcttgctgtaaaactcttgtcttatttgtgatgactatagctatagattttattgccgtacaacacagtagattttcttaatt

SEQ ID NO: 29888 - DNA, 639 bp, Arabidopsis thaliana columbia
gtgctttacaccctcaaacaagaacataaacagcactggattgatttttttttttttactattctctaatataaactacacgtaattagttattagttttcttttcattagcagtggtaacgacgtttctaattttgttaacgtccatgaatttgagtgtgtgaaatatgtgatgaatttgagtattaaattgaggtacttgtgctaccgtgtaagtttctaaaattttgacatattcacgtctatttctattatagtgaaaaaattactatatttttattctgataatagatgaaagtaaaccaagaagataaccgattaatttctttaattgggatgataaatactaaatagattgtttatacgctgagctggaagccctggtctgggtgattgtgtcgtctactcgagctaggtaatgtgtcgaacgatgccaaatatcttgaaacatatggggaacgtatgtgtgatcattagcatatctgcaatgatcatacaaatgtgtgtgtatatatggttttatgattgtgtagtgtaattccacgtatcagtatcttacagcactataatcgtaatctaaccggtctacttttttataatatagaggacaataatctgataaaagatttgaagaataag

SEQ ID NO: 29889 - DNA, 578 bp, Arabidopsis thaliana columbia
tccatcactgtttctttcatttaaacttgaaacaagcctttctgttgtgtagttggtcttatcttctcatacattacacccttcttgtggcttacattgctcggtcatcaggcatccttaccaacttcctcggcattccgatgtatgaaactccaattgatcctcatttacactgacacttttgagtgttgtgcttctgtacttattccctagaatgttctgtagatgggagagtgcaactctattctcactgatcttcggaggcctttgcttctttggaaggttagctctccatattaaactaatcactgatgccacaatttaaatcagaaactgtataaacacaaggagaaccagagtggaatagtggtagacccgacaagttaatcataccttcctccatgtggttgcagccagcgattcatcggtgcagccaatggagttctggtgtttggagtaattgcatcgtttgcagcactcgtggtaacaagtttttggctaaatactttcctgtgaattcattaaatggagaacaaaacgatagatgactcatgaccatattgttaggcagttcaagt

SEQ ID NO: 29890 - DNA, 871 bp, Arabidopsis thaliana columbia
gacgctctcaaacaccattctcgagatagctcttttgtatctaatctctaaagctggtgaagttgaggtccgcccgattcaacttgagtactccatttggggtggagaagcaacaacgcgatcagctcactacgtcagaaaatatctttttaaagtgggtgtttctcagttttgtgtttgctttccttttatgtggtgaatttttcaccgcaaaatctcggcaacctctatggtcatatcctctctcagctttagtttgaaaagcgttgttgccatctctccccttctctctcctcccccccccctatcgttctcctccatggtggttctcctccatggtggttctccacctcgaagccttcgacgaaccaaatctcgtccctcctcgacacttatgctctcgttccagatatgtggctttcccagatgttttctctcaccgaatatcgctgatggcaagagtccagcctcttggaccgtaagttgcgcctcgttcggtgaaattgtcgacgacgcaagatatggatgaacagactcactcatgggctcaagcaacagttttcagatccatcatgttcattaatggaatccagcatacgtagttgcgatgtattcaagaaagctctaggtgctaagtggacgataatcctccgcctagcacatagaacgctttgtcggggtctaagcgattttaggacgtttaggcagttttagaataaaacaatgtatatttctatactactacaatgttgaaaaagcattataaaaattaaaaattatcaaatttttgaaaatgaatttaaattttacttttaaaagtaaaataaaataaaataataaaaatataggattctttaaatacaatttaaat

SEQ ID NO: 29891 - DNA, 971 bp, Arabidopsis thaliana columbia
ctgactgaccaaatgcagatttcagagctgttttgatgtcagattgcagaagagtaatgacagacgaaggaaaaacctgaaataaaaaaagaaagcttcataaccaggtttaaactgacataatgtatcattgtctataaccaacagtcgcccagaaaagaaaagacgtagaagcaagagaaatatcaataagctcaaacttttatacgacaaatctgtgaccacttaatatttctagcccaaactaacaattaagaacgtcaaacattggatagcctcatttacatgcatcttacaccattttcaaagcttacctcagcagagagtggatcaacaagcttgacaccagcaatgtccagagaatggcaggaagcaaagtcccccacaacctgcatggccagcagagggaccacacgacaattcccgtctccataactcttccaatgcaagccagccataaggtccatctccacaatctgaatccagagctaaatcaacaaaagaggtagcttgctgtacaagtagcgctattccatctaggagatcctgcagtggttgcctttgaccataagaaagtaagctgtcttcgctaaatgaactatggggcaaggatgaccctgcttcaatatttggcgaactagcaggttttgctgtttttgggactgaaacagtccgccatacgccaactggtgcactcatgtggctatccaacattcctccgtcaaaatctccagctattctggtaggtatatctttcttatatatctcgttccttgcagatatgttgtctgtcagagtactaggctcatttgacagctggttaaggaaaaagtttccgctaagcctagtcagactaacaggtgaactgtgctttgaagaagtgattatgtgccgcatcctacacatgaaagcttggaacataacacttcccacgtctgttgccagcagggtctttgaagataataaggtac

SEQ ID NO: 29892 - DNA, 593 bp, Arabidopsis thaliana columbia
ttcgaatatacgtttaagcatttttgtgtcatgcataaatgcacgtcttttccatatgatcaacaaaaacagtagactagacatttcgctaacacttaattaatctcaactaaaagtaaaacagttcgtcataatcacatggatatatacgaatatataagaaagaaagaaaaccaggcactgcttatattctttggtctgaaaaatgtggtcaaatgtacacatttagaaagacatgaacaaagaaagagataggagagtttggattcatttggggacaaaggtgacataagggtcgctttgaaactcacagcatacaaacatagaccttctcttcactatatatacatatatattcacatgtatagtgtgtatatgtaaatcgaagtaccctagtttcttttggacttcaccaatcacatctgttacttagattcttctacgtcgacaaatatcccacaatctcaaaaccctagtcatcacaccaacaaccaaaatagatatatataaatagaggaaaataacatgacaaatattctttatatataatatagatctcttcatttttcttgaaaaagaaaaaaaaagaaaag

SEQ ID NO: 29893 - DNA, 519 bp, Arabidopsis thaliana
aacctgttgaagaagacccgaaagaagctgaaagagctgctcgtcgggtttaccctccgccatatctctctgtgatctctcttgagttattttataatcaaaataatcaattttaattactgctcctgaattctgaatttctgatgatgatgatgattccttcgtgtgatcgtgtgatttaaatctgatactactagtttgggtaaacagacgacgaatcaacgaagcggcgcgtgtgaatctcacgcgatagtgtttttttaattgtttgttttgtatctctgacgtggtttttgactttttgctattcggcggatcaacaattaaataatgatacaaatctttttttggttctgtttgggtttctgaaggtcaatgtttatcatcgattagtggtaattttcaactttatgtaatgattagaacaaataaagtcaaaaggctttttattcaaaaggaaaataattaacaaacatgaaagcttgcaacaacaattcaatgaaaaaagaacgtccaaac

SEQ ID NO: 29894 - DNA, 527 bp, Arabidopsis thaliana columbia
agaagaaaatagaaacagatgtttaatgacatgcctgcctagtttcaagaagagtcttatctcctatttatatatatgatcacttaccttgaaaaacactccttgaaaaacagcgaaaccagcagcagtggtgattgcattcataggctgtccttgtaatcctgcgctcacaagagaatatgcaactccagatccgaatgctgcgaccacactacacagtcgaaaaacatgactctttttcacacatcgagtttcaacaaacaaacaagctacaaataagccactgagaatctgcacgcatcaaagattgtatctagattctttcaaaagtaaacacacacaagtggataaagccctacatgaacagtgaatcattataagtatcagaatgatcataacagctgattcgagaaagagattgtaactctatgaagcaataaatgatgaaaaaacaaacgaagtcatctttttttcctgtcatggaatcaatcttgtgacagagaatctgattaagacctgtaacttat

SEQ ID NO: 29895 - DNA, 517 bp, Arabidopsis thaliana columbia
ttttaacagaaattttgataaaaagacataacctaaaaaaataactgtctgtatttcaacaaaaagttacgataaaatgacacaaaaaaaacaataaccgtcaatatatgaacggaaagttacaataaaaagatacaacgaaacaaaataaccgtaaatattttaaccaaattatacaataaaaagacacaacccaaaaataaccgttaatattttaaaagaagattgcgttaaaacgaaataaacggaaaacaataaccgtcattacatcaatatgcattttataccacatattttaatataattcacatcaaattacaacattgagtgggattcaacgttaataacatgtgttactagtggagccacaatatggaaaactataaaaatatacataggacaaataagacctaattcagtttgtaaaaagccagagagacggtacttcgtggtgcaaagtgtctccgcatgtgtcttcccctctttacttggagctgaaagctttaatttggggtat

SEQ ID NO: 29896 - DNA, 407 bp, Arabidopsis thaliana columbia
tacatactacaactgaaataaatacaaaatcagaaaaaatcactaacacacatgatttatatgaacaaaatttcaatttattttggatatattgtataatactaaaatcactaaaaggtcacccaccattggagatgaggaatcgaaagaaaatgacaagtatgtaaaaatggtaaatcaagatttcacagaggtgtaaaccatttattacaagactttttcgacattgatcaaagtcaaaacgctgagttatgggattcgtagggaggaatcgaacctataacctacaacctcacatacatctcacatcttccaaaatctaaaaacgttgaagaaactcagcaaaagaaaagagagcagccactaagctttagattctaaccacacattatcatcttcttggtgtg

SEQ ID NO: 29897 - DNA, 645 bp, Arabidopsis thaliana columbia
cacccaggacaacaaatactacccaagctcagtctccttcgatgttgtcgccatcaacatcagttgctgctgcatcttcgctaagaaacatcccgcataaacagcaaagccgtccccagcaatcgcagatatcttttgcagcaaactcaaaaccaatgacttctggttcaccaatgcagcaggtacaaggaggaaccaaccaccaggctccgtctccaccaatgttagttgggtcgccttcgacgtcgtctgtctccaaaaatgccagcggaacccaagaacaactgcttctgcttcctcggcggcaaacaaaggtggacaagcttccacaactactcactcagcatctcagccgtccaagaacttacagcctgcatctgcggcgtcatctgctggtggaaggaataatggtccttctgttctcggaaacccgaccacgagctctggatccaagtcgcaacaacagcagcagttgccaaagcatgggctgcagcgcaagcacagctattcttctctaatccttatatgcaagctcaacatcaacatcaacagcaacagatcaccatatctccttctggtgggtattacaccaaagacaccagcaacagtcaggttcagcacctgctgttccagtcacgggagctg

SEQ ID NO: 29898 - DNA, 323 bp, Arabidopsis thaliana columbia
acgacgaattctcggacccggtcgacgattccaacttctggtcgaccattcctctaacccgatagattttcatcgcccattcatcgtcctggtcgagcattccgccgttttggatgttcaaagtctcggtcacttgccgggatatcaggtcatttcctaggacgagtcagggcgcttgcgagacactgcaacatgggtcttcagattcaagcgctaggtggacatgtggtagcgaacattcgttatccggtaatcagtgtcgtcaacgtattaaacttgtggtgactgagatggcgatgctttggcttaggttccgaaaactg

SEQ ID NO: 29899 - DNA, 456 bp, Arabidopsis thaliana columbia
cagaacgagttctattttggaattgggttatatggtggatgtatttgaatcaatatttataaaattttaaaaaaataaaaaaaaacaatattaataggggttaaaacttcagttttttaacaattatttcatgaattcgtggtataccgttacttaataacaattataaactgtaaaatataaatatttaaaaagaaacccacccaccagtattaatatatataactttaaacacctacctcgaaccgcggtataccgggcttaaaatctactaacagtttataaattaaagcacttaagacaaaacaaaaaaagatgataagaagtagagaaataagaagaatatcttgactcctttatacttaagtattgaccaatcaaaatgcacgaaattttgacgtcaaaatataaaagagttcctgaatatcaaattctagctagccttccccatatatg

SEQ ID NO: 29900 - DNA, 521 bp, Arabidopsis thaliana columbia
ctgatatttcttgttaagtttataacaacaagtgaagataacattttgcaacttaagcctcaatttctgatatcttagctcatgtatttgtagccgcaagtaaatgttgtttgatttttagtacaaaaatcttttagctcatgtcgattatttaggtacaatggttatagatttgcttcaatatgtcacatgaacttgttcctcctcctttgatcataattttcttgtaaagtatattgtacgaccattgtagctaggctaagatttgagcagtgaattataagctttgccaatttagcaacagacgttatggttatagctcaagagttaaaagggtaacctaggagaatgcattaaagtcattttggatttgtctgggtcttgattctgagcagtgtgttgagagtttggtattgtatggtgagttctttgggtaattaaaggaaggagtttaccggttccaatagtatcagcttgatacactatcaaacctataatgtcacattgatcaaaatggtgtt

SEQ ID NO: 29901 - DNA, 280 bp, Arabidopsis thaliana columbia
gtaatgccgctcgaatttcacactgttgttattagtaatttaatacttcaaagtattaagatcgtagataaggttcgtctggagataagaagatctatgagtcccagaaaaaagtactataccgcatgatcttgacttggttcttaattctctagttttttaagtataagcgaagaataccgtttctcctacgcgtatcggatagatcatgtcgcatcaaatccgattgatgttcttatgagatgatatatatcgcgagaagatcatggccttcccataa

SEQ ID NO: 29902 - DNA, 821 bp, Arabidopsis thaliana columbia
ccgaagagtcgaaagttaaatgcatgtagtacagctgtcttgacctttaagattcatgaggcaaatattagtaatgtcataacgttagattttatcttcctgaataagttcttcatggcaacacataaaccattccatcaagtcttcaaaatgcaataatgcctaaactgaaacaaatcttctgtacacaatcagacagactaaaaaggtctaataacgattgtaggcttatccattgtctctgccgttggattccagtacccataattttaaatttttaaaagagcccaactgttccaggtttgtgggctaataatagatttgtaataggttttaaaatttcaggcccagcccaataattaacgagatgacaagccgaatatttgtaccttttatggactaaattattttggtgagaagattcaaccctttggtagccgggtaaagtaatgggggttgcgatttacgaatgtcgcgtgttgcaaagtgatgaagtttctaacaagtaacaatcccatacgggcataccttaccaaatattagaccttggggccaaaatgatttaagatggtgacaaaatcgtccattgaactgcaggcaattgacgagcaaaacaagacaaaacataggagagaccgaaacaaacaaaaaaacaaacagaggcatgactcaatacatagcttctctaatcaaattcccaactttgaaagccaagtaagcattcgctgctgcaagattgatctgatcctcggtaagactgtcattgtccaatcttcatagatagggcttgttggtttcaaaacgagaccgatgactgaaat

SEQ ID NO: 29903 - DNA, 506 bp, Arabidopsis thaliana columbia
acaataccggaaaaatataacatttaatagacaaataaaattaaagttttgttagtaaaatattagaaatgacaatagaaaaaatatcataatcatttaaaaactgtttaattctatgatttaaaataaggatgtggtaaatatattcaaagtttagaaagagaaacatagaaaacataaactaaaccattgattatatttgatttgctgggctaactgttttatcttaatattttactgttgataagattccttatgatgagattatctttgaatttacaaaaaaactataaatactgaacaagcagcataaacattgcacgacgaccttatataaataatgttcatataaaaaaaatcacaagttgaaaaaaagaaatctggtctctatggtttgcatctattagattcgttcagtgacagcaattcataatgggcctaattaatgggcttcttcgtagataagtgtattcgcgggaacaacgggttaataggcgcgggaggta

SEQ ID NO: 29904 - DNA, 556 bp, Arabidopsis thaliana columbia
caatcatttttttgttaaatagatttttaagataagctaagtaccaaaaaacacattgaaaccaaacagcatatgagtttgaatttgtttggtactggaagagtttatatagaaattaagctcatatttcagccaaatgcaattgaaaaaaatcaaagtgttagtcacgccaagtgtgaacgcagaaagtcctgttagatgataagcacgtgtgaaaacatcttaacactttcattgtatttgtcttttagattaaagttgtcggatttctcagcgttgctatgcgcaagaaaaaaaaatcttggccacaaacttagttaatactgtagcatatggatatatgtagtttgcaattgcatgtgtaacgggggagataaaatgataataaacaatgagagatcagggaatttttggaactaatcgtaaattttaccacgtcattaatcgtatagttttgaatctttatattcaatccaaagaattaaaaaggatgggcacaaagggtagatatatatgcttccttgattgaataaaaggaaactttgcattttatata

SEQ ID NO: 29905 - DNA, 540 bp, Arabidopsis thaliana columbia
gtttcaatataataacccactatttcactactaatatcaaataaaacctagatttgtatcttctgatgattattgttgttttaagatgtgagagagattaacatggatagtaagactcgtgacatcaactcgaactttaaaaaagaaataccaagtaaataattttccgtacctgataatataaagaaagtattgattatggttcactcaaatacttaacatcaatttacaacaaggaaaaagtctagtaaacaaccgaatattgttggtccacaaaatttactatatgttaatgtacaaatagcaactaagatggcttttacaagttaaacaccataaatttggttattccatcaacctgttaaacaaaataatttaataacaaaagatgcaagttgaatatttttcataagactaataaaaaaaagatagcttaaatgcgaaaattaattagaacagagagattggccacaataaattagtaataatattattattacagacattccatgtttagcctgtagacttttgaacaccaat

SEQ ID NO: 29906 - DNA, 431 bp, Arabidopsis thaliana columbia
ctttaccatgagattggtatcataagcatctataatggcatcgtgagtagtagaaggcaacgccttttcgcaaatttcctcaaaaccttccgcaagcgttttcatcaattcaggtcccattttctcagcaaacttctctccatcagctgaatctccagcaaatatacgcatagcctcttgttcaccttcttcttctttcttatcatctctccatccatcaccacctcttcctctgcctctccctcttgctcctcttcctctccctctccctctccctcctcttcctcccacactgcttccttcagcttcaccacgcgaaagtcactccttgctcttcttccagcctcttccgcactcaattgcggcttaggagttcatctttgaccgttggagcccgcttctgctgaggttgtactctctgctgctgcggt

SEQ ID NO: 29907 - DNA, 534 bp, Arabidopsis thaliana columbia
tggcccaaatatatccaaaactttctaatttggttagaggttgctcgttgctgtattaattaatgttttatgttttcgtttagagttttgtaaagacaaattagagagagagagagagagacagaggcatttttggtcataaaatccacacagaggtggttcgacatccaggtgaatccaagtaataaattgcaggattctctctctataatatatatagatatagcttgcaatcatttcctgcgtttggatcggtctgggttttgtcgagggttttttggggaagacgaaattagggtttagttggggcaaagtaagtagtaaagaagaagaagatgcagcagcagcagtctccgcaaatgtttccgatggttccgtcgattcccctgctaacaacatcactaccgaacagatccaaaagggttcttctttctcaccctatatctctccctctctcttaatttgttcaacactacttaggaggctcttagagcttttttgtactgacaaaatcattggcttctgagtgcaagt

SEQ ID NO: 29908 - DNA, 427 bp, Arabidopsis thaliana columbia
tattttttaaaaaaaccttcttcactaagcaaataattaatcatggaataaatggaaaacccacactaaaatagttttttttttcctaacggttcaacaaagcaagaataatactagattctagctcttatagaagaacataattaagaacgagtaacgacgaccttttttccttcacagtgtacaaaaaatagaaacgacgacgttttagttagtctctcctccttattggatagtccagccatctgtttgacccgacccgacccgacccgtaaagatcccgggaagcacccttaaaccctaaaatgtccgatctagtcatcttcgtcttcttcaactctttcaatggcgtcttcttctaaaatctgcagattatcatcaaagattcattctttaacccagaagctcagcaagacgaatgttcaca

SEQ ID NO: 29909 - DNA, 603 bp, Arabidopsis thaliana columbia
caacttagagttcttgttcagtgtcaattgacccaattgcttaagaaacaaagatttgagatcacttgtgttacattgcccttgctttgacattttgctattgatctaactcactctgctgtttcaatattgcagaaactgagaatgaaagaatagttcgagaattctcccacttgctggatgcatccgaagcttattccatagctgtgagatactttactctctactatattaatttctatgtgagccgagttttgtggcaaaatatttaacaatctcagtgtgtttacatagttattcacgaattagagattaacgaaccatgatctgatttcttaatagagtggactaaaaccaaagggaaatggaaatgatatctcaactttggctgaaaggttatacttttcacttatctctatagttttatactctctttgataatcaatagctggtatatccatatgttgatgctagtatttactttaatgccaggtttatgggactcaaagctgctttagttacggacagttctactctgacttctttcggaaaactgattggcttagatgtattacagcttagtgaaatatgccaagagagtga

SEQ ID NO: 29910 - DNA, 503 bp, Arabidopsis thaliana columbia
ttaagctctatgtcgaggacgggaagatcgttcgacatgaagactggtaataaccctgcagctaacctttctcataaacgctgactttttgtattagttcattgccttaacttgttggtgaatggtgtgtataaggtgggacaagaaacctctgaggaacagagacacggttagctttccattagtcggacgggtaatggagatgggtcgaagaggcttgatgctagcgactcatgccatgatgggttttggtaaagatcctgactcccaatgaacaaatggaaaatacaaaacacacatcatgttatagtgttcagtttcttcaaaacactacttgaatttaagaaactcctttaatcgatttggtttcgaatttagtttaaaaatatgtagtacagtatggtaatccgcctgttgggttttaagctggttcgatacagtcaataactgaatttgaatggaaaattcttgtagttgacaaacttgaaccatactgattttgg

SEQ ID NO: 29911 - DNA, 435 bp, Arabidopsis thaliana columbia
tttgtattggttacgatggattaaaaaataatgtcatctctatgttttacccccccgttcagtccaccccccccccccaccctatcccccccccattgtcttgatttgtagtaggtagtgtttatctttgaaaggaagaaaaataaaataaaaatgaatgaaatagataggtgatggtgtgaatgaagttggttattgtcctgctctttcagttgtgatgtaaattggagtggatagagaagaatatatgatatagatattatgatcttatgtagctttcgtctatatcatgatagattgagagaagtaatgatatatagttttgagaagttctgaattttgattgatttgatgttgtaataaatttgtagatatagtgttgaaagagtaaagtgttgtaataaattagtaaaattgagggattgtaaatagatt

SEQ ID NO: 29912 - DNA, 125 bp, Arabidopsis thaliana columbia
atggcccgagacccacgaagacaagctcaagcaagtcgccctgcatattcaggatgacaccaccaagctctcgtcccatgtgtgaggaccatcgtcggctgaggcagcgctagacctatgtgctg

SEQ ID NO: 29913 - DNA, 543 bp, Arabidopsis thaliana columbia
tatgatccccaaccagcatgcatgacaaaactattttattacgtgaactgtcaaatacaagatgaagtccaacaaattacatagtcaagaccattacatcgagcctgttttgctaacctatctgctatatcatttgcgtcacgagaaatatgaataaagttaaagctgcaaagctttgagattttaagaacgtcagctagataggttgcaatatggaggtacttccatgatgcattgtttccccgtagtgcacatctttgcagcgtatcatatatgagcttgagatctccgcagaatgtgacatgtgaataacccagtcgacgaagatcaagaactgcaagacgaagggcctccgcttcggcttctgttggactttgggctgggtgtatagcaccgaaccatgaagtatctgtgttccatccgtattatgcagggaccagccaattcccatattctcagttggtgactccatgaggcatcacaaaacaacaaactgaccaagtttgatatgaataaactagatgacttgtgcgactttggaaa

SEQ ID NO: 29914 - DNA, 485 bp, Arabidopsis thaliana columbia
tcaagcagctcagctttggagtaaccaagaaggtaaacagacaggggatttaacagtcgttatgaaatcaaacttctttagagtaccacagttatgagtttcttatgtctcttttgtttctccatacgcagagtacaggaagatggttgagaagctttacaagcctccaagtgcatgatttctgcaagctgttctgattcataaatctccaatgcctctgatgatttcacataaaacgatttttcagaagaaaacactgtcattcatttgctttattctttgtttttgaacatcagaagttctatctgtaacgttaccttgagttcaaataatgagtagtatttcagagattaatcaaaaggaaaagatactttattattattcatcttaaaatggagaaacactcagtatcatagtacaatcgccaaattgttactgtggaagtgagaaacgacgatgaaggaaagccttgaagctttgacaga

SEQ ID NO: 29915 - DNA, 506 bp, Arabidopsis thaliana columbia
ccatcattaagcaaaccatacccttttaaaagttcatttcgaatttgaagtatcctttgcttcaggttacttgcttttacaaaaactctttattcttgctgatttctttccacaaatgaaataaaagtaaattacaatcgaaggcttgatcctttatgttttatgtgtgttaaaagatttagaagttcttaatggctaaggtaaaatgatcgatcaaagaaaagagagaaaagacagaaaaagaaaacataaaagcttgacattcagaagttgacgcctataaagtttctcaaactcagtttatagcccatgttgagcccattaaggcccaaatatagttgtaccatgcacttgcccgtaggtgattggtactctacacaacgatctgtttcgtgtagctagctgttctttccatgcatgattttgcttcctgcggaaaatcaaagagttagctcatgctcgatcactctctccgattatctttcgctctttagattcatggtgaa

SEQ ID NO: 29916 - DNA, 557 bp, Arabidopsis thaliana columbia
tcctagatgatttaatatgacaattaatactcaataacgtgtgggatacctattacgcatgaacaactaggtaagtatatttattttgggattccattcttgtaaagattttgcatggaacttttttttgtgtgttcttgaagaaaaagtatgattgatcagaacaatgttctattattttccaacattgtttaccaaaaagataataaataagtgcaacgacaagaaagactacagtgtgtatatcaaagtaccttcatatcaggttgatcagttcttcttcatattagtataagcctatggttttatgttcttcccaaacaatattcttgttataattaatgaaccacctctctcggtgtttatttttaaattttcattacgtttacgaatgaaagcttttttccataatttatttttattacttcttaaaatcatcttacacaaacaccgcatacatatgagcaacaaatgaatgataaaaatatgtaagaactcaattgagttactaaggcaatgccaagtaacttattcatgtatcaaagaatcaacaattt

SEQ ID NO: 29917 - DNA, 1376 bp, Arabidopsis thaliana columbia
gattaagacctcttcggctggttcatcctttatattttcagacattgttgtcgtggtttgccgcttaggatttctttcttgataagcaaccttctcaaggaaagtagtgattgggttggcatgttccaccataaattgtttgtcatttctttcgggtggagtttgaggctttgaggtgcttgggatatgttctttttctttgcccgttgattgcttcctttttatggcttgtctttctatagcaaccctttttggtaaaaaggaggatgaaccaaaaatacttggatcttgagaaaaagataaaggttgtgtttgaactgcataaggcgaagtataaatggggtaaagtgtgaaaagatcatattgtattggctggttttttggctagttttgtatggaatttaactgggctcttagggattttagttctgattctttttgggacatgaggggtgaatttatgaaaactgtattggctagatgaaggagttctttgtgtagagaggaaatttgtttggtaatgtctttgatataaaggtctatgatggatacctttttattaatttggctcaagagatagttccggctgctgcgttctctcattgccaatttagtgttgtttctgctattctaacttgttttatcgacccatctagatttttttgtgttcggatttcttatcttccatgagtgtttgatattgttttcttcaaagtcttgtgatgggaatgatggtcctaaacttggtgggggaccaaacatgtagctcaaccggatatcttatatatctggggttgtgggagtcgagttgcttggataccagacataatattcaaaatttcttccgcttggttctctgagtaaaccgtctgcgggtctccggactcatatcgttctttgagaatttgctgggaagattttttttttcttcgtcttggtgtttcgtcttcgtcagaactattcattaagcatttttcacaatcacaaatatcgaagaatttgtgacctgtctcataagcgaacgagtagacgggatctccgagtgaataaaaaaattctattggaatgccgggtagatgctttgctaactccttttgttctttttggttgttatcaattggagagattgtattgatttccgtatagaaagctgcaggtcttggcttttcttcttgttgtttaaaagcaatttccatcgctccatcttttcttctatgaatagaggaaccattgattgaattagggtacttctatcatggagtttttcgtaatttgtccccatgactctggaaatagtttgaccagttcatctctaggtatttgtcttaggatgtggacgcatgatggactgtgttgtgacccagttggacaagtag

SEQ ID NO: 29918 - DNA, 1074 bp, Arabidopsis thaliana columbia
ttatagtatttcattttagacggtcatgatctactccatcataacgttgtggtgtgtttgattagtctggcccccagatttaacatgacatatatgtcatcgccacgtgagctatcttacttagtgtacaaaacagctcaggaacacctaatttctttcactccacatgccacgctccctacttatttagtcatcttcttatcacccaataaattgttaccaaacacatataataacattttctctaaactaatatccagcacaaacattcgaataaatcatattcactcgatttggtttttaaaattaaaatttgaaatagtcaaatttcattataaagaaagattaatctctctggtaaactttattattaatcttcattttcttgaagcagtaatcataggagacatatcaaagactgagatgttgacaagtgtcgtaatttaagttgactgagtcgactaatgaacggttattacgggttgatgtggccggtgaaattcaggtcccacgtttgctcatgcgcgtgccttctctgataattctcgacgaagaaaaagtccatcgaatctcagccgttggatttagtaatgggtccgacgaagtgcgtggatagcatcttagaagttgcggtccatgtcagcgtgtgtggacaaacccgcaccatattaacaacttgcctttctctctgcaccttagccactttaccaatagtgtgtcttttcttttttttccctctcgaatacacttttggaatagataacaaatctgatgcaagagcttgtttcaggtaaaaaaaaagattagaagactcagatagatttatagatggatttgactcgttttcaacccaactttggttttaagttcttttttaaagtgtcgattcttataaagagcaaaagattgtcgtacaaggcaaatacttacactcaaaagggttgagagtttgactgactccttggagatggagacaccgtacgtaacatttcatcttttaaaggaggggttaggctggtttagtgtagggtgggttcaatgtttcgattaattgattgttttaatatagttttc

SEQ ID NO: 29919 - DNA, 796 bp, Arabidopsis thaliana columbia
tgagagctttccaagatccttgaagattccgtctggaatggaaaccggtccattgtctttgatgtgtattgggatgtcaaatcagttagcacaaagtccgaatggcgtctatgctcagtgaagtttagcactaaaaacttctgtctcttcctccgcctgccgaacccgttctgtgataatctcaaggatctttatcgcttctttgcttccaaatttgtcacatttgtcggtgtccagattcaagaagacctcgctttgcttaaagaaaaccacggtattgtgatccgaagctcgttggagattgggaaactagctgcgaaagctcgaggtactccaattgttgagttccttggaaccagagaattagctcacaagattctttggtatgacatgagtaggcttgattctattcagtccaagtgggatgaagccagctctaatgatcgtcttgaagctgctgccattgaaggttggcttattttcaatgtctacgatcaattgcagcagtgatttttcgtggcaatgttcttcatgtaactcttatgttaaccttcttgatcaaatggatttgtgagattgcgcttgattgcgcttgattgattcatgttgtgtattgtgatgagtgaacaatactgtctgaataaaacatgcccggccttgtctttttgtctgaagattttgagattatggtacaatgccaaaattttaagctgtaaaaacataatgaaccaaaaagagacagcgaaatagaacgagcaaaaatgtaaattccttggatagttagatacaactggtt

SEQ ID NO: 29920 - DNA, 592 bp, Arabidopsis thaliana columbia
aataaagaagagacagtggagttgttgttattacgtgaaagaaaataaaaaacaggctcctaaatcctatgaatcacttcaatctcttaagttttctgtgtggaggaaccctttctttctggaaagtttcacattaacttcctgaaacacaatcaaaatcatgattccgtaaagggtcctttttggtttgctcaatttcaacgtcaggtgctaatatagtatcagacagcttctgcttatacttctaaagaccgggaattgcttccaagttatacttttcttcggctttcggagtttcgccttctcggctctcctgcgttttcggtttcttcaatgcatctagggtctggagataagaataggacgaactatgagggtatttgctgctaggattgcttatttggctagcaagaaaccgacggatgagtccctcagaaacggagccattgtatcaggttcatattcgaggtagtacattattcctcccatgcatccacagaataaagccacctgtttccattaattgtataaaacatcagttccattgctcaaaggggaagaaagttggaaataacaaaagtggtttgtaatt

SEQ ID NO: 29921 - DNA, 503 bp, Arabidopsis thaliana columbia
cccactttcattaccaatgctttcttcctaggtatatataatcagttaatcacttcctggtctggtcactcacaaagagactgcttccaacccaaaatcatcctctcccgatcgaatacaatgcggtaccagccacaaagttctctgcgagccacaaatattcccattagtattttgcatatatatacagaattttgtgtatcagtgtggagatacttacgtcctatgacgttaatcttgagacctacgctcttcagaacacccaagcagtacatcacattaccctcctgttacataaccaaaaacaaatatgtagatacataagctagtaaatcaaagaaagaaaaattaaacaccatgtcttgcctgagtccgtgcagtgaaaaacggattgttgaggatgattttggatcctcctataaaagtcatctctactaaggggaactgtatggttgtagcgtttgggctgcatgtgaagatgaagaacatcagaattcaaatgt

SEQ ID NO: 29922 - DNA, 241 bp, Arabidopsis thaliana columbia
acctgcggccgaaacgggcgcgtgctggccaccaataacgccgaagcgatcggtcgacgcggcgctggccggcctcggcatcgcccacctgccaacctggttgtgcagcgagtacctgctgcgcggcgaactgcaggcgctgttctgcgacgacggcttgcccgccgccgagcccacctgcatctatgccctgcgcctggaacgcgaagcagattcgcgaacccgcctgctgctggctttc

SEQ ID NO: 29923 - DNA, 598 bp, Arabidopsis thaliana columbia
gtcttgattttacaaatctgcaaaacatgcataaaatctacattaagtcaaaacacttaaacttgttagcaaacaaggaatttagaatctaactattatgcacaaagagaaacacatgcttgtagtaaaatactctttttaagttccggttccttgaaattctcaaattgtttttaagatctgatctagggttttctccgatcatggctcctgaatcgatcaaggaagagatggagatacaagcttcgacgacgaaaatgatgaactcttcgctcatggaggagcacaaagtcgaagaggaagaagacgacgacgaaggcagcgatatcgacagaagatataaatacgtgccagaaccagaaccggagtgggatgtggacagctacgatggtcgtgaatacgagacagatcctgaagatcgtcagtttttctccgacgaagacagttatcaagaatttcgtacccgcaagcgtcaggctatcgagagtaaggtaacgatttttttttgtggtttttcttgtaaaaatttcgccgattatattaggtttgagacaattttttgtaattttgtagggttttcttccagaacctttgagtg

SEQ ID NO: 29924 - DNA, 515 bp, Arabidopsis thaliana columbia
atatcatttgagaagtcatattcgaactacttgttttgaaaaaattaatctgaagttcaacactatagtcaaccaaacaaaaatcagtttctatatgttctatcgattttctatatttaactacaatatctgaaataaaacctccaaaaattggactaaccacctctaattacaggatacaacttgaatatttacaagagtagcagtaaaaatcgcatagaattatttgaatctccagacttgtactcttggtatttttatttagttacacaacctcattagaaataaaggtttaagaacagttaaaacatgctcttccctctaaaattccttcttcagctcctaagaaaagaccaaggtcctgttcctgtcccaatcctgttacagtcacatttacattctgttataagaaagttggaaaagtttttacatttgtactacaagaaacagagagtttcacaaagttttaccgccagaatccaacggctgctctaagactcatgtaaatggtgaga

SEQ ID NO: 29925 - DNA, 433 bp, Arabidopsis thaliana columbia
gttgtgctggtagatccttgttcttacgataactgagttagctgcacgatggttctttcacggtgtccacggcaaatactaattctagttatttagaggctaccaatagatgcaaaatatcgttctgttgcaactttatctgtcccttgataatgaaaaagtaatctttctgttgatgtaatccatctcaaaaccggtttttatctgttttaagtgtcattgattatgtttaaacccccccggcccaaatttttggaggtgggatttgaaaaccccatagaaggggaattactaaatttagggaacccaaggggagaaatttcgggaaattttttttactttttgggtttttgaaattgggaaaaaaatcccggtctctcaacggggttttgaacagcgcgggggggagatttataaaccccttttgacattt

SEQ ID NO: 29926 - DNA, 466 bp, Arabidopsis thaliana columbia
tttctaaattccttcatttaacttttctaaagtattgtagtattactttaaaatcaaccaaaatttatacagtattgttactatgatgtgtgtatgcatatggggtcaccgcgtttgatggtggcgtgtatttgtcaaaatggactatgcttttaaataaacgttagatctggggttctctattcttcttttttagtcataaatcataatatatacgttatgatataatattgtagcctctatgtttcgatttttgttcctcgatgtatcaatcttgaaaagaatcttagtttcattctaggtaatctcaaggtgtgaaaatcctatgtacataaatatgtaaagaattctcaaccattattcttaaaccgaaaaatctctatcaaaaccggtccaacaccagaacatcttgatgatctagacaaatcagtttcttaagaaaattattgatatgcaccactttact

SEQ ID NO: 29927 - DNA, 576 bp, Arabidopsis thaliana columbia
accagataaacagacttaagcaattcatgcttgagaatcgtgattactcgaatctatggatgtgccattattagcggcagggatagctgcggaagaaccagctgcattttgtgatttagtctccattgtcagcatcttcattgatattttccgaaggtaattcagttctgaaaggcgatataaaagagtatcaggaaggtatacatggatttcatacccaacatattgtggcttagctttacagataccgaaagtcagttcttttccatgttgtggagtccattgcctcacaaatctctatatttaccatactaacgaaacaagaatatatgttcataataacctggttaagagcaccgctgaaaattttctcctcgaatctagctgcaattctcctgagctcgttaattccctctggtccggaaaatggaaggtgcttctttagtgttccattctgcgcaagtggcaagcaaataagtaaaacaaacaaactaactattggtcaaggaacataataaccttctatttctgtagtatttgactggcatagacaaaacaacgccgctagaggataag

SEQ ID NO: 29928 - DNA, 630 bp, Arabidopsis thaliana columbia
gctgtgttccttttctcagcaactctctcatcttgcctcgtagtctcggcttcgctcgtggaagggaaagtctcttgtttcgactgtcccaatgattatgattattcaggtaactttaatgtaaactcttttgactagacattgttatagtagacacttatatactcaaacacttgtgaataggctttatatctttgtgatacatataggaatcacggtcggagttagctgtagccacacaaacacgcggttcactgtaacaactgacaagaagggtgacttcatatcggaacttccctcaaagatcgaatcaaactgtgaagcagaactccaaggcagcgtcaagcaactttatgcttccaagaataacgttaagtcgaagattgttaagcttggcggtgacaaatatggtctctcttccaagttgttcttcttgaaatcatgtccaagaagcttcggatcttttagttcgtccaagaccgttgattaccagttcccccgagtgggggctggctcgaccagttattacgtcctttcttgccatcatcggtatccatgatacgcacggtttaatcttgtcttgtgtgtttatgtaatatatcaaatttatatgtgtgaggcatgtactac

SEQ ID NO: 29929 - DNA, 475 bp, Arabidopsis thaliana columbia
tcatgcactgaataacatcaactcttatcatttctacacaaattattctaaagtatttgattgaatataatttcagttaaatttgatcattattctttatcatctaaaatatatatacttttaaaaagatgaaagcatatgcatcagcagagaaaaaaaaagatgttcaatgcagaaaaaaatatttaattttcggaattaaatttaaaaaataaaacaaatttaaataaaccccattaaagcttcctaccaaaataaaaacctttaaagcttattttatttatcactaaaatcataaaaccactaattattacctaaatcgttgaatatttcaatttgatgtaattttacttttaacgaattaaataataattataccaatgatgatgggccaagcaagtcgtgcaagcaaagaagttagctaggtcccactctcataataagtccagaaaatggacgatctagatctagtgta

SEQ ID NO: 29930 - DNA, 631 bp, Arabidopsis thaliana columbia
tttcttgaatgcatatttttttgtgacatctcttaaacttttaaatatatggtatagtttatggtccatgtaatgtaacgtaatggtttatattagtgctatcgtgatacccgggttcaaacctacattatgcatatacatgtccgttaacaaaacaaacacaaaaaaattataatctagatccattcaaaactttgccggaaaaaaaaagatccattcaaaacagcatcactcaatatatataaccaacatattaaaagtgataataattgaccactaatcactcaaactagatatgtttgtagtacataaaataaaattttaaaatataaaacaataggaatcaaatttaaaggatcactagaaaaaggtaaattaactttgaaaaataatttataaaattgatcaacaattggaacaaccatatgatttttcgactcaaactacaaaatctaaactagttttccttgtaatttaggtaaaaaaattgaaagaaacatataatttatgtaatagtaataatccgaataaatgcattatagccttatagggttatgtctttttattgtactcttcataaatttgtgtttttcagacatcttcttaaaacatattttatatttggtataga

SEQ ID NO: 29931 - DNA, 655 bp, Arabidopsis thaliana columbia
tttagttttgttttatttcccttaaatggattatggatcaatggatgatgtagtactgttaacagattctattgatgaatttcacgactatcgcaagacgaatttgaaatcatcacgaaactgaagttgttgttttttttttcttttcaacgaaggttgattgatttacgactacgatgaagtggattggtttctaattaattattcctgaaaatgaaaccaaagatataatacaactattactaaatgaaaagaagaaaaatagagataagggttctagaagataggcattgatatttgttttcccttttggggagtttgtcatctttatgggggaggaaacaagtgggccgaaactggcaagcacttatcctcttggctttagtcttcttctttacggttactaaagtttttctctttcttttcttctagaagaccatattgacatttttccttgtatctctagagtaatagcactaaatataaacctaacttttgatgttagtctaagacaataagacatacgaagctttaaaactctattgtcttgaatgacacaatggcacatatcaatacttatattcgatctagaagatttggaagagtatagatttaatttgttggtttatgaaaagaaaacagtatttggtggaga

SEQ ID NO: 29932 - DNA, 575 bp, Arabidopsis thaliana columbia
gtttagaccctaaactctctaatattcaacaatgtgctgccacgattcattgtggtacttaataagaaattcatcttacacatgtcacttatttttttcaaaaataataaattagttgaaataaattcgattgaacatatgttactttattttttatatactcatgttcttagattgcacgactaataaccaatgtaaatgttcttagtattagctagatgaaatatctctcaccgtctccgtccaattatatccttaaattttgcttttatatattggatttgtaacatttcgatttacttagacaacattgtttacacgtaattcatttatatagctgataatactatattaggcttaggctataggcattatgatgtacaatttatcgatttgattcgttttattaaacacaattcccattcattttaaatatccacctacgttcataatcattggttagtccgcattgactaatgcataacaaatagcatcattagaaattgattttgcgaaaatactagaccataatttcacgtattccaacctccaggaataaagccgtaatatatatg

SEQ ID NO: 29933 - DNA, 465 bp, Arabidopsis thaliana columbia
gcgtctgggcgattggtttccatttcaaaatgaaattgactacattacccttttgacaatttttttaaaactttcaaaaattagtcttttggttttcttcttctcagtcacgcctcacgagtcgtgattgtcgccgtcgacggtctctttgtcgccgtcgtctctttgataaaggcaaatatcaaggaaccctcataaaaaaatggtacttgtcttgtctctgtcgtcagattttaaattaataaacaaattttaaaaagagaacgacgaccttcgaggaatttaataatgaaaaaaaaggagcagatactacgaaaactcactttttctgattccaactgggttttaatttcttactttaggggaaaaagtttcgatctttcttctcttcaattgggtgctttttttttgttggtaggcattgggtttaagcagtgaagaatcggagatgtcacctgacggaga

SEQ ID NO: 29934 - DNA, 517 bp, Arabidopsis thaliana columbia
tgattcgttattcttctttcgattgcgatcacaaatgttatagacttttcatttctgctaacatgcatgtgactaaaaatgttggcaggaagtacaaatttcgtgatacttgctgtattgactctgcttctcaaagggacatggcattatcgtcaggtaataagatctctctctctcaatgagtttctctgtgtgattctgtataattgactcagctctttaacctcccagatagtcttgactgtgctagtagtcgtatggggacttcgtctgggactgttcctccttatgaggtttgcaccatgacaccgcttcaaatcgatatgcatttgcaaaagttaatgattttctggtcatgtctgatgtattttttgcatcctaactttgagtaggatcttgcaatggggtgaagatcgacgctttgatgacatgcgtgaaaatattgggaaactagtagtcttttggatttttcaggttagctacaaactttatattttcatctttagaagagagagaa

SEQ ID NO: 29935 - DNA, 401 bp, Arabidopsis thaliana columbia
aaatttgttatgtggtgactttatgactaaatatgacatattacgtaatttccgtgaagtgaataatgaagaaggccagtaagtagataagcttagacaaaagagtaagccattgtatgtcttgctgtagaagacgacacaaaattacgtagctcaagggacccattttgtctagagatgacatagaaagtccactttagttcggttttgataagttgtagtgaaaaccattcacccgaaaatgatatgtttcttgacttctgaatagtttgtgtgtgcgttaattaatggacggcttgtgtttatttcatttatttatttctgctttgatgttgactaatgctatagtactttgtggctcttatatacacaaagtttctctcatcaaatttgtgacattt

SEQ ID NO: 29936 - DNA, 418 bp, Arabidopsis thaliana
caatgcaaaggttttaacgcggttttcttaggtgcagcagtaggaacactcacacctcggcctcttccaagtcccaaggaagctctcccccttcctgcaggaggaggtggtggtggtgcatttgaaccttttgctcccagtggtggtgggccactacttgtactacgacccagccctggtggaggaggaggaacaggggtcttggatagaggtggtggaggcggacaggggtcttggatagtggtggtggtggaggaggagggggagcacccaaccttgtagatgaaggaggaagtggcggaggggctggtggcttgggggcatttgaaatattagctttaggaggaggaggtggaggtggtggtggtgtcgaaggtgggccaacacgaatagaaccagaatgagatgtaggtggagg

SEQ ID NO: 29937 - DNA, 527 bp, Arabidopsis thaliana columbia
atagcttttacatggacccatgtttctggattgagacatattaatttggcaacaaataataaggacaaagacttgagatgatcaaaatgataatgacaatataatgattgtcgctaagtaaaatttaattaaaaggctgtgactggttaaacatatagaataaatggaaaaatagaataatcacatcaggaagaaaaataatttttatttgctttgaagatggaagaattcatgtgatttagttactttttgatatttttcgaagaaacaattttcttccaatttcttttgttggactaatacatgtaattttttccctttctttttgttttcttctattaaagtcaactagtcacacgactcacaccctcaatgatatgacaagtatgtgtcatgtggattagttagtgtggaagcaagtcttttaacatccaatgttttctcaattcttacctaacacggtaacacctttttttttcccaacacatggtactaaccggttgactattccctggtactgcggttga

SEQ ID NO: 29938 - DNA, 495 bp, Arabidopsis thaliana columbia
  unsure (1)..(495): unsure at all n locations
gatgaccaaattcagactgaacaattatgcatcttaaacaagattaattacctcaaataaggaacaagataaacaagagcataaacagcataacgagattttccagtgtcaagccaagcaaacacccaactctgtatttaatcatcacaatattttgaatttgtttagtgtttaaacatttaattataagagatttactaaggattaaggagaaatgaaacaaaccagccaattgaagtaaggtatgaagctgatgattcccatggcggctaatctcatatctgttgacacaatcgctgagttttcttcttcttcttcctcatcgttgactcgtttcgccaccggaaaaacaaatgaacttaggatacacgcaccaattgctgttacgagtggtgcgtcctgtgaaaactccgctctgcaaattactctctcaatctttctacatagctgagaaacaaaganaggaaccagttattgagaaaaatatcttgagag

SEQ ID NO: 29939 - DNA, 574 bp, Arabidopsis thaliana columbia
taaaaaaataaaaaaaataataatgaaataagacgtgtgccaaggcccaagggattggacgaatatagaagaagtacggattagcgaagaaaagaaaaaagaccataaacaaatcaattcaagccaaggtggtttaagaagaccaaaacagctagcccatgaaaagtctcaagtcaagtttttgatggatacattattgaattgaatagattacgtttttctttattatacgataataggagaattttgttgttggaactcttgcaagactgttttttttcttccaaaagtctgttgcacttttttttgtttggttttgttttcgttttctaacattttaggcaagataaaatgatgaacttttcagatagaaaatcattcaatatttttaacaaaattttatttaattcaaaaagttgttgtttacagttcacctaataaatttacagccttgggcatttcacctaaaccagaagttacgatgcagccaaaaaaagaggaacaaaaagaccaaaagggacttagaaaaaaaaacatgaattaaagaccaaaggatgatgagaagagattgatg

SEQ ID NO: 29940 - DNA, 530 bp, Arabidopsis thaliana columbia
cctatttcatattattataataatatagaaaactagctataattgtatatattaagtaatgtttagatatttttgaaataaattatattctatttcatatcagtaagaggaaatactgatttatagtttctgagaaaaaatatgtgtagccatttatagaaaagagcatttattaaattaatttaaatataaaatagtgttcttttcatgtttatgtttacgagttcaaaaacaaattcgtgtgggcttggctcttggtttaaagcggacaatatcatattagagaaaaatatttgggcttggagagtccaacaattgatattagagcctatgtaaaaaaacgtggacctaaagaggtgggtttgggctccatgttcggtatggaaagagttctcaatgtaacacgataagaagagtgcttcaagttgtccttgcaaataaggaatgccagagcctggtgctaaggttttgcttgaggggagggctaaagttcggggtttggtttgaggagataattattgggagacaaa

SEQ ID NO: 29941 - DNA, 505 bp, Arabidopsis thaliana columbia
catttgataattgatgctctcaaagaatgaaataaattattttggtaaagtggagtttaaatgacgtaaaaaatattgaaataacaagaatgaaagaaggtaattaagtcggtccacgtgaaaataaagaagaacggtccacatcgtgacagcgacaaacgatactaaaattagcaataaataaacctgataatttactcttccaataaagttttcgtttcccaaaagaggaaaatatcttaacccactcgttttcttcttaaagcgaacttatcaacacaagatttttttcctctttaatcatttattaatacggttttaaacaaaagatcatctagagcttaacatgatgattagtaaaataaattaatcattagcttgggtcatcattatatccgtctattactaagtatcactttaccacaaagtttaatatttggtaatacgcagataagtcaggaccagaaaacgaagacctacacttatcgatatagagatagattta

SEQ ID NO: 29942 - DNA, 569 bp, Arabidopsis thaliana columbia
cgagcaggtggtgtgcacaatgtaaaacaaagaaaaacagaaacctttgacgtaagattttgattatttttccgacaatgtctgagtaaatgagaatggtggaatctggctccaatttcaatgattcaaattgagggacaaggacgaagaaagaaccgcgttatggttttagactttttagtggtgtggtgaaatttacgtcgagttttgaacgatacatatggatacgagttacggtttcaagtatggttcaaccgacgcgaattagatcgaaccgaaaatttgatcgaaaaatgaaatcgttgtccgccagaaccggataaaaccggaaattgggaggcggatgaaattagtttttgactttttgtacataaccaacccatcatcagtcgatcactcactctcggtcactgaaaattaaaaaaagaaacaacactagctaatttcaaaatgttttatgatcaatggtttataataatttctaacatttttgcataatcatcatcgcatggtggtgtttaattatttaattactagccagacagtgtagtgaatttattgttgaaata

SEQ ID NO: 29943 - DNA, 590 bp, Arabidopsis thaliana columbia
tgtgctgtttaagatagtgcttccttcttagatttatgttactctcctgcgaataatgctaagctatgaaatccttattactctccatcgtctaatatatatggaaaatgtattctcaacataccttctcctggggtcattaaatagctgcatgttctgtgaacacccccccgtaaggattagttgatctactgctgccataagaacactaacttgaaaaaactcatgtgctcatttaaacttgctaagaacaatatatgtttcatcctcgatgtcggttgccatgattttttttaatgttgaaggtgccgatctcgaattggtgctggctttaaaaatgcagaattcgctattaccgttcacatggggtcagcgttgcctcgttggtgttcagtagattgatgtatacagaagaaggtatctggcaatgttattcaggcttgcaggtttgagacttaccaactccaggaccattactttagtgtaaatctagcaggcagaacttcattttctgagacgtttactcttcctaaattatcatcattgaagatgcacacctaatgtttaccattgagattgggggagtctgt

SEQ ID NO: 29944 - DNA, 560 bp, Arabidopsis thaliana columbia
cagacataaacgtaattcaataagaattgaaaggatacatccacatttattacatgaattggggctgttgtaaggcctggatcccacacctaggatgtattacgcagaagagacaaacatgtgacctttacgtcatacaaataagaggggaagaagtccggagaagcgcaacgttgcgccgaagtgatcaagccatgcgagccacaagcaagtccaagaggaaaaaaccaacgaaagagtttgtttgaattcaaaccaagactttgtgacattgaagacacaatcgaaacagaagcatttaatgttaattatgggattaattagcaatatttaatcactattatgtataaatataggacctcatagctttgtaaaggagattattttctgtgatgtcctgttgaggcattatgcagaattttcaataacttggatattattatttactaaagtcaaacgtagtttcacttaggatatctaacttttatcttttaatgcattttcctctgtttcccatgtcttatgtcctgttgaggcatcatcaaatgtattgaaaaggg

SEQ ID NO: 29945 - DNA, 545 bp, Arabidopsis thaliana columbia
cgaaagcatattaattagcaattcaaaactaagagacaaaagttacaagtaggtaaagacatttagatctaaagcctttaacaaaaaaaaaatgacatttagatcttaattatatcgttaaccattggatataattaagaagaagaatctatattttctattgttacagttattatgctcatcaggcccaaacaatagaaaatatcttatgcaaatgtaccacttaaatatctttacaagaccctgatattgccatacgcagagaaggacacgaatgtcacgaatccctttacaatatgagctgaatagtatagtaacaaaattgtcgaattttagataaacgaaataaacatatataactcaataagttttatgagaaataatcacgaaaatactaaacagctagtattatattcgtaggcgttttttgagttatatttttaacatatttatagcatatagctgaaccatttttcagaaacgtaaaaatttgatgaaatggcgaaatcaccttttcaaaacgtgaccacgtgaaaaagagttta

SEQ ID NO: 29946 - DNA, 390 bp, Arabidopsis thaliana columbia
attaacaacactatatacataaaggtctttctaaatcttaatgtaatcacttcccttggaataatttaatgcatgttcatgatttttatatattaagctgttttggttgccatgccttttaaattgtaagaaataatacattccatgaaaacaaagttagtctatgaaatctccttaaaagcatcttcaactcttttacattttgcatacatattaacaagtgcactcccgtgcaacaaaaaaggtggtccgaatcaattttttttttttttggttgcccactttctatctattactcaaaatcttaatcagtattagtactaaaattgtgtctacatactttgttaaacaatttttattgaaactttttttttgactcttatgcacatt

SEQ ID NO: 29947 - DNA, 468 bp, Arabidopsis thaliana columbia
gagacattaatatgaacaacctcggccattatatgtcatatcgtctttaaaaaatgttacacaacattgtgaactcaaattcagaaacttgttagcggatgaatcgataatgacgagttcacaatgtaaaactatgataacattctcttacacacaaaaactaatgtgggagtaacttgtacatatctctctatttctttcttaggagactaacaatttggaattagatccaatgatttctataatgtatgcataaatatgttattggttaagagatgtggtgtgtttatatcggtattattaccgttacaaatatcattgtcttaaaaataacaaagaaaaatgtgtggacccacaatgaaatcagacggtcagattttaatcaaacgttgatccactttctagggctgacctttctttcttctcctctctttacctctctctctcttctaaaatccaaagcttgag

SEQ ID NO: 29948 - DNA, 699 bp, Arabidopsis thaliana columbia
tggatccattctcgtcatcgttgtcttcgttgctggctcttgaagctgatctctccacttcatcatcaatatctctcttattgcttcttctctcataaccataacttttaatcccaaagtccaattgaaacgacgacgttacactatccggcggcgatactgacatactaggcaccgcttcctcctcctcctcttcctcctccacaaccgtagctgctcctaagggcattcttcctccttgtcgacctgtaaatttggtttattaaattagtatattgtttctattgtaatcctgagcgaatattcaaactgatatgtgaaaagttaggtattcttgttaatcaaatacatccacaatagatattttttttctttggatttaaataatactttaattaaaagatggttcttctttcttgtcacaaatcagtcaaaacatttttggaaaatgatttcaacatcccatcgacacatttaagccaaatcggactctctctatatatatatccagaaaagatattaatattcttatagtcgtaagaaaaaaaacatgtaagccaaattagggattctaatataagacatcgaatgttatgaataacatcgactttcttttgtttcttttgtgtctagtgtgtacgtatataatcacaccatttaagtaagagaaattatagccctatgcccattttttatttt

SEQ ID NO: 29949 - DNA, 1006 bp, Arabidopsis thaliana columbia
ggcatcttgtcattgaccagctctatgtgtaaagatttctgtaaactaatccaagtatataatatttcctttgaatgattcaagttaggtagtgggataaagccaacctgtactgaagtcctgactcatcaacatcatcgaaatcaaaagggcatgaacaatcagggtcatccaagtcgtcttgggaagataatctactggggctcctagaaaacgcgaatcttggtgagtcactcgaagacagaactcctgagaagcggcctgaatcgtatttgctgtcctttgacagctgaagagtagatataaataaatcaacaaaatatcagatgaggcaatacaaaatatagtgatatttttcttgcattgagcaagacacataagatgtaagaagcataaccttttgagtagggtactggttcattaatccagaaggagactctccgcttctagaactcctgtacaacgcaatcccaggcaaagagtcctgcgatgaaggggagcgtcttgtgcttttgggggaaaaaggaggaagtggattcctacctggctcagagaagttagatgaaacgtatctatttaacgtggctgaagaaggaatggtcactggagcagtccctggtctcacattaatgcgcggactgttacccccagatatgtatcttggagtagatggagaacccgatggtgaaaagggaggtgaaagctggtgattgtcaccaaaagcatctgtacgtgaccagtggaaatcgtgtaacccaggtgacaactgatgagactgagctggcgaaaaagattggttcggtgttgcgaattgagctggaggtctgtgaaagccgctagtccagctatgcggacgttctgcagatgaaccagtcaatggaggccgaccagctctaccagtaaaggaatggccttcaacacttctccctggagaagggaaaacctcataggatctgttgcaggacttccacataatcagttataatcctcggagcaatgtgatatg

SEQ ID NO: 29950 - DNA, 598 bp, Arabidopsis thaliana columbia
  unsure (1)..(598): unsure at all n locations
atggagagcatcttcgcgacgatttcttctacggaggttttgctctctcgaagtagctcgagtggagattttcctggctctcggggaggttgtatagtctctatggtagttacttccggcgtcgggaattcgtcggcagttaccattccttcctctatttcgccgtcctccattctcgatttctccagtcaggctcgctccggtacttctgacaggatttatgatttttctcttcttctttttttttgtactttgtttttttgtcaaactatttatgatttttatgtaaactatattttgttacaaatattatatctactccatgatgggatgataattgcgtaaaagagattatgtaacattttttttcagaaaattctgtataaagacaagaaaaaatttggtttgatatcaaaaatattatgtaaaaaacaccaaaaaggaaactacttgataattttggtgaaggaagagagagacatatcagatatgcngtggtagaacagaggtttgatcaatcaaatagccttctatggtacggaaattttattgagttgtagctaagcccttatactagatttacgactttgcggatttg

SEQ ID NO: 29951 - DNA, 1004 bp, Arabidopsis thaliana columbia
attaagaagtaattattaattttaaaagtcacgattgtgtatgtatgtatgtccgtacactgttaaaaaggggtcccagatctgacggtcgtgattaaaatgcgacgctgcactttctttctttctttcttctctactttattcaaatttttcagtatccattctttctctctctttttttctttctctactcataaaagttgttcactttaaattattggatacttccctcacatttactcttttttgtgcaatcctttcaattttaatttaaattattcagcaatcttcaaaaacatacaaataatgttttaatccaatctcacacgaaaacactgattcttgttatgttaattcatcattcaactctatttacttcactttaatgctatgagaaaggatacactttagttaatcaaatttatcaatactatatattactagaaaatagaaaatgaaactgtgattagtcttgatggtttatttatgaatccaagtggtgggtaaataaatgaacatgcaaaactaataataggaggagatagatgctcagattccacatcaaaacatgattggacggttgtgatgtcatcataaataacagtaatagcttctttttttattgttttgttaccgtcagatcattagtagtctagtattttttttaacattctgttgtggtccccgcaatttacggggcttcccctcatatccagccgtgcatcgcgtatcattagattccctcttctcctacaccttaccacaccctatcattgatctccttctcgcgctattttgatagaagccgcgataagccgaccccccctctccaatatctcgtcccgttttctgcggctgcccttctctgcacagtcgataagataatctcccgctttcattcaatcggacggctggtatttgaagcttataagacacgtgtcatcatcagaatcgacaatcacaatcaccgaaaaggctcacatggatatgtttgaccacggtac

SEQ ID NO: 29952 - DNA, 1343 bp, Arabidopsis thaliana columbia
tatttctgagagagagcgctcgggcatgtttgaaacaaccgattaccatccccaagatcatcacgaagttccaactcatgctcttcgattcgaagcctatgaacttccaaagccatcagtgccaccacaagcttcaaacgagcttgttccagtacccgagccttcttattatagcgagtcacaccagccaatttcaacatctttggtttctgaacgagagtcatcagaaattaagctgcgactcgatggagttaagcaaaaatggggtagaccgagctatcaatcgaccacagcagcttcttctactactccacaagcagcaaacggtatctctacacactcagatgcaggagttggttcatctagctcaaagcctcgaagcagttacgaaccaaagaaacccgaaatcgatcccgagaaacagagactcgctgcatccttgtttggtgggatcatcatcaagaactgacaaaaggtcttcttctggtggtcacaagccggcgaaaggaactgctaacaaaaccgcaaccgtacccaaggaaaatcaaacccctgttcaaccgccaccggacttgctcgacttcggtgagccaactgccacaaccgctacagcaatggatccttttaaagaattggaaggtcttatggattcttcgagccaagacggtggttcatccgatgtgatgggactatactcagatgcagcacctgtgacaacaaccacaagtgttgactctctcttatccgaactgtctgatagctccaaaggaaactcacgcacgtaccaacctcaaacctccaaaggaccaaacacaaaggaagctcttgagaaagacgctcttgttagacaaatgggtgtgaatccaacaagtcagaaccctacactgttcaaagatctcctcggctagacgaaccattctccgaccaaaccaatccattcatcgactcacatcatcatcatcatcattccatatttggtaatgtgctgtggggtttgggaattaatatgtttccaattcaagaacagctttttgttgtacctaaattacttctcaataggaaccattcagtttacaaaacacaaaagagaggtaaatcacgcatcgagaacttttttttctttttcttttttggtttctcgtttaattttggagtcatcaggtaatggttttgagtttgtcttgttgtgtctatagaacatttgtaacatcttttacttaagaggtatttaatcttctttatgtcaaagagtttgtctctgtttattggcattttcgtctaaatctcctccgccatttatttattcctcatttcacaagttttagtctctgaaattgtcaccg

SEQ ID NO: 29953 - DNA, 635 bp, Arabidopsis thaliana columbia
gccagtgtgctctaaagcaggcttgccagtagtgcaactgccaaaggaataccaacatcggagtgttcctgaacacgatgcagcgtttccaggacctcgatgagagcctttgtaatatcagccagatgtgccgatttcaaagctctagtgaagaactcatcacttcgagagaggaaaccggcggaggtgatcgaggatggaacttccttaagtttctggaggctgacaagaatcttatccgtggctgcagtaaggcttgagtcaaagtcctcaatcgttaatgcatccacatcttcaacgaacttagcggggcccatcttgaccttggtccagcggacgaattgatctaggacgaaggtgagatcaggtcggtctcgagcccacttggtgatatcagtcttcaattggtctagagacgatgcagcgtcgtcgaaagtatgctgatggagtttagaagtaactccactcggcagctcaggaaggtgtttgatggattgcctgaggcggtaaaacgtgtctttccatgtctgcagaccattggagatttctgatgaatcaattccagaaaatttggaatgcagctccacgactgttgaggcaccccaagcgtgggccctagcatgcaattgctgttg

SEQ ID NO: 29954 - DNA, 549 bp, Arabidopsis thaliana columbia
aatcaaggaaggattgaagataaaatgtaaaatctttaggcaaatttggagaaatagaaagagagagaaaatgagaatgggaattctaaaattggtgaattaggaggattttggtgaaatgagggcaagtagggatggagagatatatagagtgcaagaaagataaaaatattttaaagattaataatagtaatgacttaacaaaaaaaaaaaaaagatggaataatattcgaatttaatgatgggtggttccgagataatactattagctcaactacttatatgggaccttgatattaaattaagtagtcagattatttttcatgttttgttcacacgaaatgcaagttacaaaagtctaacaaaacctagctgaatctcataagtcatatggtagatcataaatttggtttatcttttttttccacatatatttgggcatcataacattctattttggtgtacctaattttttttttttttgaagtttttgataacaacataacttgttaattatccactacaacacaacaaaatatgacatgtttg

SEQ ID NO: 29955 - DNA, 578 bp, Arabidopsis thaliana columbia
cttacaggtacttgaatactcataattcctctttatgtagttaatgtaatattggtgttaaaaactgatcaatgtgttaattttctcatgtatatatagccagtcttgtcatgtggttttcttcctgcggtttgttgtgggtcctctatgcacttctcacttcccttgctgggtaaagttattcctcctgtttgatcatagatgtcctttgatggagtttatgttttgaccttaacattttttctccacagtgatcattgttcatgcaagcataagaaccccaaatctcaaggcacgcttaaacacattccgtgaagaattccgggctgtctggcgtaactacagtgaactttaagtcacaggtcgcgctacacaatctagaaacaaacaaaacagtcatctgacaagtgaggggatgctttcctcaaccatgttcgcagtttattcttatgatggcagatgtagctctatttttacatggttaagatggttattggcagttcgatagcagacagaatagattcacttgaaatagtggacatacttgaccaagttacttctaattggtgtagtgatgt

SEQ ID NO: 29956 - DNA, 815 bp, Arabidopsis thaliana columbia
atttcatgtgtaatattatccatcttgttaaattttctaatctctaaaatttcataccgtttgtgtttaacatagtttccgatccaatccaatccagcaaagtgaaataatttcgaatgataaggctgttttgcaaaatgccaaatatggcggaacaatttttatttaagaaacaagataaggattattaatgatcagatatgcttgatgaagttgtggtccattcttacttctcttctgcatatttatcacatcggtttctcattatctctatgcattcgggactactaatacaacaatagcacaaaaatacaacgtgacaacaaaaacaaccgagtagaaaactataaagacaacaacatttcaaattctctgttgccactaatactgaaaatccatttaaattttctttttgtgggttgaatttgcaccatataaaaatccaataatacaaaagaaagcaaatatacatgattggatattcttcgattatgatgtcgaacaacaacaattattaacatgtgtatagtttggcaaaaaatgaatatgaggtaaagagggctggacccattggccctataagcattaatgggcctgaaagcaacaacagaaattggaattaaataacgttgggtatctgtctgtcacatgcaacacagacaacttgagaatggatcaatcaacattcacgtgccatgatcctctcttcctcttattttgtctccttccaccaatcccatatctttctctattatacatctctaattatctcacttttaacatatagtttttttatacatctttaatgactatat

SEQ ID NO: 29957 - DNA, 646 bp, Arabidopsis thaliana columbia
ccaccttgaaactggcacattttactaagcagaatggacaagaaaagtcttcagttactgcaagacacatagcaaacatatacgtaacaggttagggtaacggatgaaatatagacacacatgggtatgaaacaggttaaaataatactagttaccttcagtcttctgcaatttgttgttatagtatctgtagttgaaaactacatttcctgttctcaacctatgcaatgaatgtagtggtatagagtcaacttaacgagatggacatttttagttgtacgtaacgacttgtataatccccataaaagaggaggacagtcacaattcaagaaaactgccaactatatattaagggagatagcagaccggccaatatattttatacaattacaaaaaatcataatgagatgaggcaagaaatctgagagcgcagaagaaattgcagactaaactgaagattacctgataatttgcaacaaggaagaggaagagatgtcattatatgaaaatgaactataaggagatttttccgttgcccaacttcttctgcagatatggtgacttgcacttgctgcggagactcttcacataagaagtgtaagaattgtaagaatatgattcgatgatatttcagaataatgtatgg

SEQ ID NO: 29958 - DNA, 462 bp, Arabidopsis thaliana columbia
ggatggggcccaagtgcagacgaacgatttgcacgtcagtatcgctgcgggcttccaccagagtttcctctggctttaccccgctcaggcatagttcaccatctttcgggtcccgacaggcatgctcacactcgaacccttctcagaagatcaaggtcggtcggcggtgcacccgcgaggtatcccgccaatcagcttccttgcgccttacgggtttactcacccgttgactcgcacacatgtcagactccttggtccgtgtttcaagacgggtcgaatggggagcccacaggccgacgcccggagcacgctgatgccgaggcacgccgttaggagatgtctgcagatcctgatcgtaagacaacaagttatattatactttgtgtgcgatgttggatgcggcaccgttatcgcttcgagtttcgatttcacaattaagacttttgcaaagttaacaattca

SEQ ID NO: 29959 - DNA, 477 bp, Arabidopsis thaliana columbia
gctagaggctcccttcgagttttcggtttaccctttcgtgtatcgggtaatacctagaaccgaaccgatacccacgggtacactaataaaagacccatcagtgtaaaatcgatgtacctgtatccgccccgaaccggttttttcggttcggttccggttcgggtattcgggtacggtttttatgcccaggcctaggtgaagtgattatgcatgccttacttaagtaatgatatgtgtaatcaaatatattacaatttggtagtataattattggtatttgttttgaagtatatgaatctctcgtaaaaaaaaaatgtaactatttatatcaataagttttttctttgacatttatcaattagttgttgtattaattatgatttactttagttgttttatttgtagatcttctcttcaccattatttcttcaaatagtattgctcaaaaacttctcaacgatatatccaaaacatgtt

SEQ ID NO: 29960 - DNA, 226 bp, Arabidopsis thaliana columbia
gattagtgtgtaaatataattgaaagttaatgagttgtgagggattttaaaaaaaagtacaaaataaaaaagggggatgtaagaaaagatgaatttagataataaaagtttaaataaaaaagtttatggaaaatgaatatatgataataaaaagttaatagggtaaatataatattagaataaaacaataacaatgaaatataaaaaaagagtttgataaatagat

SEQ ID NO: 29961 - DNA, 699 bp, Arabidopsis thaliana columbia
tgcattcaatgtaaatacctccttgacacctaactcactcttcacttcagttttccttatcttgtttgatccatcctctttgacaatatcacttccaagtaattccatagtctcagaaggaatgacttcagattctttcatatcttcctctttcatcaattcattatccatggaaacagaatcaccctcataagttgaaggtgttggttcagactctttcattcccatactcgaggcaacagaaaacagttttttattcttgaagatggtaactggaacagtacctggtagttttctcctcgtatgcttttttctatccgactcatctggagtaacctgagctattatctcgtcaagaataccctcatactgtgccttatcagtctccttaactttcttgaaactcgaagatgtgaacatagacgaaagtctaccttcaccagtgatagtagccgcagcttttaacgccggattcaccttcttaacctgaggttgctgcgtttgctctttccctttcttcttcttcttaagtctcccactaaacctaccaccgtcgtctgattcatcagtcgattctggtccacttggcttcgaccaatcctgctccgtcacttcgtcgagatatccaaatcgccaccttccccatcttcaactacaaacccgcgagcctcctcgcgccgccgggaaacaagtgcgtcg

SEQ ID NO: 29962 - DNA, 413 bp, Arabidopsis thaliana columbia
gacccttctttaaacaacgtctcactccaccattccatggtgaagcagctcctctattcctttcctcagcctcgccgctgcagctctcatttcaacctcctgcaaccctccaaaggaaacccggagatacccggggctaccacttgcacaccccgggatcaccaccacaccatggcggtgagcagccaccgcaccaccttgaaatcatctctgtgtccctctggcagttttgcccacaggtatatcgctccttctcctcccttaacgttctccttccccagcggctcaagcgcctctttcacaatatccctgttcttcactagactctttacccgttccgttatccacccagaaccttcctctaatgcgtatacagctagtcgctgcgagattatggcagacagattgggatg

SEQ ID NO: 29963 - DNA, 568 bp, Arabidopsis thaliana columbia
ctagtgaccgccagtgtgctctaaaggtaggtacagaagctcgaatacgtactttgttgctccgacgcccgcgggacgaattggcgggaggatgtggttgttggaggagtggatgaagtacgcacctcgtttctcgtctttcctctcagttttggaagggcaattcttgttgtttctagagaaagatatgctgtagacaaattttggagaggcaaagacaaccccgagaaacttgtacatcttcaagagattgtcgtagtatccggctgcaaaggcgcgcatggggaggtcaactcttctcccttctacttcgtcttctccttccttttggtccttcactatctcatctttcacagcgccagacactgaagtagagttaaatccagaatcatttggccctggagcctgtgccgcagcagaaacagagccctcagcaaatctcggaagctcaaagctcgccgagtccagtgacaaaacatcttgctgtacatccatcagcacacgccacaatccccacggaaacgattcacataagtgccaaggaacgaagaaagaaaaaagaaacata

SEQ ID NO: 29964 - DNA, 341 bp, Arabidopsis thaliana columbia
cgccagtgtgctctaaaggttgctgtccaggtaagtgattctcttcgacggtccacatcttctcttagtcgttgcttccttaagcattctttcaggtctaagtggacatatctcactcacatgttggtctcttaaagacgagatgagttttgtgttctagacatgggccatacgttctctaagcccatttgaagtgcattttacatactatcaagtatctattgttcttaccttttttaaaaatgggtatctatagcagtccacctatactatacacgttcaactaggattaccctctacgttcacatcccgtcccgtcccactccagtccgctcacgttc

SEQ ID NO: 29965 - DNA, 633 bp, Arabidopsis thaliana columbia
ctcttctcgaacgaaaccatgttgtcaccatctataagaggcgaacgaaacccgttctctgcatcgattcctacttgatcagcgataagtccagtgttcccttgcttcttgtattgtaaacatccataaattgaaagcaatgatcccatctacacaacacacaagtgacaacaaacattcaaacaaacttgactataaccatatacatattcacaacatcaaaaatcaaaacataccccgaagtagattgctatcaaagtgaatgtccacctaccaatcaaaacctcaatcatatcagtctcaaaacatcaaagatattccctttccacacaataaagcagagatctttaaagagaacttactgagtataatagtagtaaatacgccatccacgattagcaaaccgggcaatattgttagcaagaaggaaacaaaacccgagaacccgaaaacccaacaaccaacccggatggattcgttcaaaacaaggtctccaaacatcatcaatgcacaaaacatcattaccattaagtgatggttgagtttgaactgaactatcttcatacttccataagactaataaagaaacaatcattggaactattcccatatagcacatagtacactctccaa

SEQ ID NO: 29966 - DNA, 632 bp, Arabidopsis thaliana
  unsure (1)..(632): unsure at all n locations
taccgagctctaacagtttaacacaagaagcagcaaaaccacctaactcaaattgttgtctatatacaagaaacataatcataatgggaaaaggaggaggttatgtgacggtggcggcggaagaagtggaggagttacggaggaggaacggagagttggagagagaaatggaggagatgaagaaagagatggttcagctgtggcggcgtacggtggtggcggaggaggccgaggagagactctgctcgcaactggcggagtagaggtcgagtctttagatcaggcgcgtgactatcactctcgtatagtctttctcatggaccaaatctctcgtctctcttcttcctctcttgaagtcgttgttacgaattcgtagatagattaattattattttgtctttagctttttttttttttttaattgtgggatccaagtagtttaatgtgttaaaaagatatgtaaagaaattttgcataagtattacaaattttcattttcttcataatcctttaaaattatgtccagaaaaaagtgtttaccatgttgcaanaatttgttttaggggaatttgaagttatatatctcgaaatcatgcaacatttgtgattgcagagacgtctcagaaagtttt

SEQ ID NO: 29967 - DNA, 479 bp, Arabidopsis thaliana columbia
caattgagtagttcgtctcaaatcaaattggattataggttctgaataaaacgaaaatgaaatatgctttgtatgagaataagatgtttatattatgtatagttgattggcttaagatcaagactcgataaaattttggttcatacaattggccaatcaccaaagtgattcgatcaactcttgttaaattatctgattctctttctacctaatttgtactgttgatgtgaagctccattaattctccattattaagaacaataagcgtgaccacgaaagaagaaacttcgtaagacgtctctgttatgtcgtaatcactagagttacatgtatacaataacgtttttacttaatgcggtttttatgaaggataatagtaatgtcctatagcaaaagatctccattagaacaataagcgtgaccacgaaagaataacactgtctgagacgtctctgcaatcacaaatgttgcatgaattc

SEQ ID NO: 29968 - DNA, 838 bp, Arabidopsis thaliana columbia
tatcattggatgagttgtaggtttgttatgttggtatatatactaatcagatcttcgtaataattctatagctaatactacgtacatgcaatcattttttcttttgtcaaacatggaataatttattatttaatagaaaaatgtatcttatagatgaaatattgatatcaacttttgcgtctttttctgatgattaaaaagtttgaatccatgtaaccatttccatataacacctgtaatgactcatgtattaatagccgatgagactcgaattcatatgtgttgaagaattacaattactagctactagtttttctgttgatctaatgattcattatataactcgagggctcacaaggttatttacaagggaaattcaagttccaacacaatacatgtttggtttcttttgtcttatcaaattttgatggttggatagtgacttactaacgtgtgacgaaattataaggtttaagggcgaagagtaagagggggaccagaaacaccgcccatacataggaggaaagtcacagtcaaaaattcataagcacaataacaaataatcccataacttggcttcttatcttgtccctttctttacttaaccctagtttaccaatcacaaaccaaagttagacccacatacacatctcaatattagtttaaataaaaccccaccaaaacctcctttttcactttccaaatttcacttcctccaactcaaagaaagagatcagaagctatagctatacaccaaaactaggtatagagagagaaccctacaaaatcaaaaggaagaagagacgaagatgaagaagatccagcttggatttcgttg

SEQ ID NO: 29969 - DNA, 581 bp, Arabidopsis thaliana columbia
ggtcctgattctgatgctgtgacaaaagtgtgcttggatctgagggattgatcataccagtaacaacggtagagccagaaggtatctgagcaattggttcttgatagacagatggtctttggtgaaacattgggttgctcatactgctatcactgaggcattcattatatagcaaacacacaatcagagttctgaccaatcttagttcttctatagcatcaaattaaggctcatgagggttccaatataagaagaaagagtacctggaaacggaattgggtgatggcagctcgtgtccaccaccgctatttgatttcagctgatgagcctgctgaggcggtagattctgcggctgcgatcgcggagtcggaggcttcctgtatccagcctgcacgccgtgatcggatctctcgtcatctgagtaaaccctggcctggaactcattagagacggtggctgcagtcacaggcgcacgaggaagggcgattgtgacaggcatcggcggtggtgaagagatcgcagcaaatccgtcgtcatgtagctgatgcttgttcccgacgttgaatcgtgcgaactgttct

SEQ ID NO: 29970 - DNA, 850 bp, Arabidopsis thaliana columbia
  unsure (1)..(850): unsure at all n locations
cgtgtgtatgcgtatcgatattttattttctttgaatgaatattgctcttaattatggttactctgtatcattcaaatttaattggatatatctctaaagaaccatatttatacgttaagtactatgtgatcatgcatgtcaatttcactataactcactgtaatctatcaaaattaatgacctttaacgaaaaagactatagtctatcaaacgtgattagtttcgaatttcacaatattctcttgtgctccagattaaatccatatacaaagactataatctatcaaacgtgattagtttcgaatttcacaatattctcttgtgctccagattaaatccatatttgatatatggatagttattttaaaaaatctgaagatccatttctcacagtttataacacattaaaaagaaaactatacaaataaagatgctagagttatggaagcatgtaattgtgatttagtgcatctcttcatttattttatagcatgctttatgttttcttattttaataaagtttgaagccgataaactataaatatatgcaaaatatccaaatccaaatttgatcgttcattacataattgcggtgcaaacgaggatttctctcaatccatatgacataaattgttgctcactagtcactaccaccccnaattgtatgatagagtctttgtaaacatatatatgtactttgtaaggcttggaacgcatgaaggcacgggcctcagctacaaagcaaaggaaggagacatcacaacatcacattccaaatttatggtatttggatctanaaggtaaaatgaaataattttaaaaatcattagggagtttgtttgatgaaat

SEQ ID NO: 29971 - DNA, 869 bp, Arabidopsis thaliana columbia
tcaatcatagcacatgaataataaccatggataaagaatggtgggattctcgaatacaagtaaacatttcattatatatattaaattattttttcttttattttagaactttaatacgtaagtatagataataatatacaaatctttttaaaatatttaggaaactcaactggctaaacgatttcgtaagagaagtttagccaatgaagatttcttagaaagaatgtttactggatcccatattggagttcaagatggatggtgagttggaaatggccctgatgtgtatcgtcctcaacgtacatatgatactcaaggacaagttgatatgaacacaacttatgttggtgaggattcataggtgccgttatctactccagaagatgcataaaatcagaccaatcagtcaacacaaggcaccattaatccaccttccaatgaacgatcacattctgatcaccgaagtaaacgtaaacgtggggcatcgaacattgacaatcggactgatctatcaaaagctttccctgaacgatcaaatgcaataacaatggcagcaactgagatgtcatccgtaatgacatctgacgtaaccatggctgcacgacggatacatcaaaattcagagattgagtttggctcaatattctattcggatgccaataatttactttcgaatgatgaagttgctcgaagatggtttatagggattcaagaaaaaaagtttgcacttctttatctcaaccaaatgattggtcgtaaacatgacgagtaatcattaaaaaaaaatcatctgtctttgctttaggattttttgggaggggcttttgatttcatatattctatttgattttctaaatgttattgtattg

SEQ ID NO: 29972 - DNA, 988 bp, Arabidopsis thaliana columbia
aaggtagataaaatctacactaaacggttacgatacgtacgttgcatatcataaatgcatcaaaattcaattctacacattaattattgaaaagaaaaaaaaaacttctatacattcacatacgtccaaggttcaacacgattattcatttccaaaatgtatattttataaaaacaaaaagggaaaaaaaaaataactctaatctcataagtcatataacatgtttatatttattaatttatatcaaatatacgacttagattaatattataatcatgcacatgaaataccaacgactctactcgccgggaatctctcggacacggtcttcctaacaagagagttgatctcggggctcacttctttctccgttgactctggaatagttgtcaacgaacccgatttgtcgtaaacgacgtagtatcgatctttatcgccaccgccgtgacccaccgccttgtagaccggcgaagaaggagtggttaagctttggtgctgtttaggtttgaacattgacttcaagaatctctgtagagaacgagagatcttgttcgagtgtttctttccaccggaggaggaggaagaagaagttgtcggtggaggaggaagaggaggagagtactccggcgaaagtgagctgagagaagggatacggcggtcagggaggtgagacatggacatagttctggcggaggaagcagagatggctgagtcgagttgacgtttgaacgagttgagctcgaacgagtcgtagagagtgctcccacagtcccatacgtgtgaactcgtcttcttatgcttcatgttagaaagattgttattgttggtctctttcttcttctcctcttcctttttggtgttttcttcgttttgactcgtaaatttttggtctgcaaaatttgtgaaacactacttaacttttgataatctctgtcccaaaagagtaacaggtaaatgaataaaaaattttaaaaattggaaaaattgt

SEQ ID NO: 29973 - DNA, 859 bp, Arabidopsis thaliana columbia
tgatatgttttcaccaaatcagtgttaactgttgatattcgactctgattggttttaaattaccgtagctggaaaactagctcaattttctataatttttatcagatgctctaaagctaaatcctaatgaaaaatcttcatctgttcgatcttttagtactttggaatggttcgaatcatcaattatcttctttgcatccaagtgtgtattttattattttaatatgaaagaaattaacactacaacaaatatggacattaatagcagacaagaatagctcatttaccgtacctgatataaaagatgtgatttttttcggttactttataataacacctaaaaacgctatgatagaaaaattatggagtgggaaacaaaagtgacttagtccgccaatacttagtgaattattatttcaataaaaaaaaaaaaaacgttcgatactctctctctcgtgaaaacctaagttcaatactctctctcgtgtgaaaacctaatttcttcttccaaattctctgtgtatacgaatgaaatctctatcaaatctccagcattatcgccgttcgtgaaaagcctcaatttcgctgttcgtgagaagccctaaatctccatctcaactcagttgaactcccagcgaaggcatgtttctatcctctgtgatttcattctctgtttcatatctctgtgatttcgacctgtttgattgtgatttcgacctgtttgattgtgatttgacctctatgtgtgacaatagtttcgactcaaatttagatggtgacttcgacaaatttgtgtcataaacgatcagtgtgtgaaacttgtacaaattagggtactgacttggctacagatttgttg

SEQ ID NO: 29974 - DNA, 892 bp, Arabidopsis thaliana columbia
taaccttcatcgaagtataattttgttatcaaaaagatatctgcttcttgacaactgtgaagtagtgaggaggtaaaagatagataagttggaccctaacctttagagaaacaaacacaagtcttagtggccaactttcctaatggtagattgcaagttgtgcggatttgtctctaggctagatatcttcttcatgtagaagataatgaatgggttaatataaatattatatgtttaaccaggaaagctatagaattgcactatgatatggttcatttcgattagacatcatagaaaggtaaggatgcagaaagataaataacagtagagtccatacttgaacaagaaaatgagtttgtgttagtccatatatttctttttcttcgttttcttctccaacaaggcatttgtgctgtctcgaccacaaggaacctcgcttacaacagtttcacggcttctgcaatctcagctgagctaagcttgataaactgttcatggggctagctagaaagacccaacccttcacttttaagccaaactccaacaaagcttcttcagctaactttctaagatgtaatgtaagctaaataaatagtaaatactaatgcagaattccaaactttagggattccagcagaaaatctgttcatagttatcgacagtgatcccctctccgaggagcggtggttacgaagcttctccaactttctatctttgccccctttgtttactaagctctttaaagttcaattatacagtttcaggggtgttaccaagtctcagctcccttgtggagcattttatcaaaggcaagtatgcgtcattcgctcgtgccgtttatgccaatcactggttgaggattcgcggagtcgcctcatggacgaatcaatat

SEQ ID NO: 29975 - DNA, 938 bp, Arabidopsis thaliana columbia
gttctcacaggtgtggcagcgctgaatctgtacatgtttgttttagggtgattcagaatttcagattttcgtgagaggttttgaatttgaacataaaggctgctaagtcatttatctttctttgttgctatagtaattctttgcgaaaagatgttgaagttcaccagtagcttcctcaacaactcatctgaagtgagacactcttaaaatgaagtttacattacaacaaagttatatctaaaacaccatttgtgtacacagcattgtggatattgaccatcatactctcgcaggaccccatatgttgtttcctttttttctgtagtgatttgcattggttgatgcacgagggagaaacgtatatattattgacgccttctaaagacgaacaatgatcctttagatcccaatcccaacctaagtttctcatcaacgtatgtgatccgaagcttcacttcgctttcgaacccgtatttgaactccaaagatccaaccttgatttccggagctcaaatatcactgcaccactcactgtcaacgctttcagcttcctacagataagatcacacaaaggtgagaagattaaacacgggagaagatgagactgaatgcatatgtgaattttgcaatagtcacctgtcaaggagacgtctccgtctagaaaaccaaaagcattaatggaaactttgttcctaacgatatcaggagcatcgatggcttgtatcatctctttcgttttgaagaagagacggcctatcacgcttctgtagcctccaccaggagaggttggtctagaacagtacaccacttcccaatctgcaccaaatcccacaagttcacatattgatccaaggaagaagcaatggcagctaggttcttacacttttacctccaaaaatgagaggatttttgacaggctccttgacacagtacttttg

SEQ ID NO: 29976 - DNA, 538 bp, Arabidopsis thaliana columbia
gaagagctgaagatatgaccataatacatgggagttagtggaaacctgtcatgcaagaagagacgtaggtttttcgtttttattgggcattttaatctatgagggtttctaaattccatcaagcaacatgacatagccattaatcccaattgaatcgaaaagaagcggagccaacctagcccaggaaaaccaccgcataggcggtaagaggagaaagaaacacgtgttaaaccagaacaaaagatggtagacggtcgccgtggagctgttacgccaaaacaatattatatcttgctgtcgaatatatatagcacagaacattgtaaaaaatatagacagtttaagatatgattttactttgaagccaatgagaagaataccaaaaagatagactaacaaagatcaacatgactataagaaactaaaagcgagaaaccaaaaccatctctccccgaaagaagctttcatgtttcatgcaatatgctgaactcaaatggttaggggtaatctgatttacacttgaatcatgtgggactga

SEQ ID NO: 29977 - DNA, 574 bp, Arabidopsis thaliana columbia
acagatcaaagtttttgtttttttctacaaaattaagaaactgagaatacccagaactaagaagcatcaacacactaaaaaaacctaactttttccaacttcccaaaatcaaacacggaaaaaacattcaatacaagatttttcttcgcagtgtagcagattgagtgaatttaggaatctaagaagcatcaaatcaaataaaattgagtaccatttagaggagttaaagccacgacggaagagagaaagactaaacttcatgagcttcttggtctgcgcagaagctacttcggccgccgtcattttcttttcaccacagcgtctctgacacagaagaagaaagagatgtagaagaagacgaaggctagtgtgtgcgagtgtgtatgtaacggtccgctgaaattaggaaagtaacgctcttttagaggtccacaagaacacaccgacttatgatagctggacttggaccatgtcaaaatatagccgttgtatcttacacacgttgccaaaaaccaacgagcagcatcctaagcaacaccgtggcttgttgattgattcataatgggcttagatg

SEQ ID NO: 29978 - DNA, 435 bp, Arabidopsis thaliana
cctgacatgcctccggacatacattttttctttcccaaattagctttgagtttactttttctacttttggatttacctcctccacctccggacatacctccttcacttccagacataccttcttcacttcctgacatgcctccggacatactttttttctttcccaaatctagctttgagtttactttttttacttttggatttacttcctccaccactggacatacctccttcacttccagacataccttcttcacttcctgacatgcctccggacataccttttttctttcccaatttagcttcgagtctactttctatacttttggatctacttcctccaccaccagacatacctccttcacttccagacatacctgcttcactctcggaccctccggacatacctctcttcttatcgagcttagctctgag

SEQ ID NO: 29979 - DNA, 620 bp, Arabidopsis thaliana columbia
gaggactagaggatcccctactccgctgacatggatttttaattaaataaattaatattgaaatggatgtctaagtttatgggaatgcatttaattagaggcacatgatcctcctctttgggattgctcaccttgtaaacatctctttatgcttttttgaaaataattatttttcattgatgtgaaagaaaagaattttaaaagccaatatctcactcgttacaaaaaggtaggacaaaaagaacccaaattgtaggttatggtccaacaagatcggtattaggtgaaactaaagtgaaaatatatgaacggacaagccatgaaatgtcaaactaaatcggcttaccaattaaaaccaacccaatcaactaattatttgtgatgagtattttatttggttatcgtttataaaggacttgcaaatccccactttctatgaaaagttcctccctgcagagacgatgtttgtctacacgtctccatgtgaaatacatgactaactaaattacggtgcaagcaagcaatatctagcttttaattagtcaaagctaagaaataccctatcataaaagtacaaattatgaacctgtaaaatgacagagaagtatctattttgcaat

SEQ ID NO: 29980 - DNA, 500 bp, Arabidopsis thaliana columbia
cgatcactcgagtgttttccaaaaagatatcgtaaatcaattatttgcgacgttgattgcaaaatcgagaccaataaagagtatcccaaaaatgtttaccataccaaatcctatttctaaccattttagtgtaaatattttcgcatgaattcaacttgggatcagtaaatcttagtgtcgattggaatggataccactcatgtaagtctatcaaccttttgttccaatagattatgaattttttttgtgatgtttggatcacttatgtcatgacgtttgaattattaagtatccagaggacaattttgtttattaggattccacaacgaagaatgtattttttgtacttttacatttagggttatccaatttataacaatcgatcaaaactatctcattagattctattatagttcaaaatggtacaactacattccatcaggatgaccaacagaccaccaaacttacaatcttatggcagttgtagtcaatttacttat

SEQ ID NO: 29981 - DNA, 497 bp, Arabidopsis thaliana columbia
ctgtcgattcgattttaaaaccgcccaagggaacgataatcttttgccacttaaacccttcgctaggttatgaacggttaatacttaatatgtcccaatcgttggtttgatgggctttatatatgttactgttagtgggccggaatatgggccatgcgtaaaacatattttccttttatcaaacaaagaaaaggtctagcttggaagattaaagatcaatcaagtaacagctatagaagaaacattcattgataatctcactaatttaattagtcacgtctcttgcttctcgtttccatcaagaacgcccttgtgatctccacacatagatgttggtttttctgagagaaaggttcgtacttatccgagaaaacgacgtcgtccatgttccgcaccacgaaccctacacaagcctccttcagcgtcttgctcgaaccaagatccgagacatcaagaacgttaagaacactagagatgtccaaggaacttaacatata

SEQ ID NO: 29982 - DNA, 932 bp, Arabidopsis thaliana columbia
ccggttgagtaaaatcgacgattaatgaagtagctattacgatttttgaccttatccaaaatttcttaaacttttgagttttatccaaatatgtatgaaaccttattaaggcacagacactgcttttttatacatgtaaaattttataattgccttataaataccttgtaaaatctcttaaacattcttgtaaaaaacttataaaagaccttgcaaaatcttatgaacaattgaaatagtaattaccatcgagaaaaaaccttataaaccttacaaaactttataaactttttcaatttaatgatgggtatttttgaaatagacatctaaacagaaacatgttttttttatgtaaattaaatccatgtctttgtttgccttgcttttgttattttatatctatatgattcttttgtagatacaaatgttctaactatattacggttgcacttacaccacctaaaacttgtatgttcacaaagattgcgtcaaatccacaataaggggtgtgattggttacaaaattagagtaaatgggaagaacaaatagaagaaaagaaaagtcacatcaagaggaaaataaaattttactttttaacattttcacaagaaaagtttttcttccaactgtttttgactggtacatatgaagaagaatttgtttcttttttttttaattatagtgaatcaattacaccctaaatatagaccttactgatcatgagcattcaatcattcttatcatgcatggaagttttgtttgtaagaattgttgaatgggtgatgaagtctttacctatgtcttcgatgctgaggagaatagatgggtagaaccaccatttgtgattgatgccctaagcccttcaccacagagaaagtgagaatcatgatacattaaaaagaaatggaagaaactggttgcgtcggcgatg

SEQ ID NO: 29983 - DNA, 920 bp, Arabidopsis thaliana columbia
  unsure (1)..(920): unsure at all n locations
aaagttcacatggttacgagacgatgagagacacacaaaatctagcgaatacaagcacacaacaatacccaattttctcatgtgaagcataattcaacaatgtctgagcttgtcacaaagataaaagatagcatcattggccaaacatgaaactgaatcaacgatatcacgttcattgctccagaaccatacctatgttcccaacatatctagttcattgctcctacatcacatctacatcaacctctctaacaactcatccaaaagcatacataagggattcaaatttaagaggtcaaaagaagtgaaaataccccactagcaataacaactccggtgacgacagggacgagagtgaagtaagtcaaccaagcctctttcttacgcgtcatcaggtaagcaaacacggcggtgaaaaacggcgtcgtagcaccaatggcttggttaaacgaaacaggaagaaagcggagagagatgttaccaaagaccaccgacacacaaaaaacgagacttagagctgcgatcttaaagaactgaactctggatcgaatcgtctgcatcggaaccatcttcaaccaagcaatggcgacgtagctgagtaacgaacaagccgtcatgtgacacatggtgagaaagatcgggtacttgaatccgtaattgctaagcaagtacttgttcagcaacaatacaccaatgttcgatgagtaccaagacgcgactagcccgattgtgaaaaacctggcattcgtcgccatcttcatcgcttttcttcttcctaatcctgggtcgactcgatctgatgagatgagattcaactanaacctaacgaatttccgaaattgggattggtgggaacgaatctggacaggagatggagatctgtcggtctctgatacagaattttgacgcgcgtgatgatg

SEQ ID NO: 29984 - DNA, 639 bp, Arabidopsis thaliana columbia
tttaaaacaggtgtgaattgtgaagtgaagtttttaaaatactgtacaaaaataaaagatgtgtttataagaagcaaaaaaataaaaatggtggggaaggtaagaagagagaagagaagaagaagcacatgtcacagtctcgaccatatgcctaaagtggtcccttttattctctccttccatgtgattatcaaagactatttgttttctcttttgtttacaatccatactttacacaaacatttctataacaatggaccaaacaaattttctgatcaaacacaccaaatgtttatgatttgaaattttatatattcagaattaagtttgatccaacccacattagaccaactttgcaaatactgaatcggaaccatgccaatgccaaatccgttaaacttgacatcatattggtgtttagtgaaaagaataaaaataaaatattggtgtttagtggttaattgtagtttggtggtacgcatgtccagataatcagtccggacctaaatcttaagaaaataaaaccaaatcttgacctttaaactaaacatgtcacagacgaaaataacacaacatttccatctctctatacataatataatattttcatttaaattcgtttttttcttccggggatcc

SEQ ID NO: 29985 - DNA, 875 bp, Arabidopsis thaliana columbia
atttgctcacatagctatcatccattagaatgaactgaatgaacaaacacaaagaggaaagataaaaacatttatattagaatgcagttatgtttcaggtggcagattcttatgttttggtcacgggatttttaaatttctatatgcattgcattgcgtagattgggatatttgtcgattattattattaataccatgttttgattccatctttgtttagcttcagacaaaagtaaggattttcacgttgtttggatttggtaaagctaagcctaaaactgatggatgtcatgtgggtccttttgtttgttcgacatgtgttcgaatcgctcctcctgtactagaatcttatgataacttgaacttttgttaatcaaataaggataaggctttgtgatatttatgtccaatgttgattaggagttagatagatttaaaatgttttgaacaaattaacttataagtattaattagtttatcgcacgatttgaatggcttattaaaaaattacaaactaaaaagtctattattattattttatttccttaaaagtctataattcatagttcgacgcttacattatattggacctttaaaagcataattaatacgcgttacgatgtgtccatgttccaaagaaaatccacctgactagtcgatgtttattgtattattgaaccatttgataaacccagagaccaaagcagagtgttgagttcacgtgtttttgttcttttctgctatatattttttttacaagaaaataaccatctacaagaatgtaaagtctatataaaacgaaaaaatagtgtccctattcaactgtattggcgggtaatcggccaataagtaggccagagttttttttttaatta

SEQ ID NO: 29986 - DNA, 686 bp, Arabidopsis thaliana columbia
gagtctggtgagaatcccaccgaagagaaacaagaccctctttcaggtaaagaaggctccgataaagattccggtgacggagaggcgagtggtagctcctccggcgccaagaaccaaggtgaaggaggacacggcgtcgaggtacgtagaagaagaattaaaaacactacggattgagctcttattacaggattaataatatgggtctttttttttgtagaaagtgaacatcgagaaacagcttctgctacgattcattgtgatgggtaagaaaagtcttcctgatccgagcaagaagtcgcaacctttttggggtttcgtggaaatggtgacgaccaatgttgaagatgttaaaaatgctctcaaaggaggtaagaatttcgtgaattgtaaaaggatttggtgaattttgtgatatatatttgttttctttgcagaggagtatgagacgaagactcgaggacatagacacaaacctccggcgagagctgtcggagaaggaatatacagaattctccgacataaacctaatccgacaagaaagcaccacacacatcttgtctacaaactcgaattcccatcggtttcgcagaccagagaacacgagccacaagagtcgctgaacattgagccagaaggatccttcttgatccaaatacgaaatccagagcaaggaggaggaggta

SEQ ID NO: 29987 - DNA, 597 bp, Arabidopsis thaliana columbia
tacatgattaaactattttgaacttgaatccatttgttttggatttactcacttttccaatgttacttatagtttcgccagtggaatataaggttagaaaatatgagagtaaaaatcaggaattaggacatgtaaaatccagaaatatctgaggacggatctcacgattgattataagattcgcattacattttctcttcatttttttcagataagaaaattggattctatcaatttgtcgtcctattgttcttttcttgtttgatatacaaatacgagtcactgattttttttagttgattggtagagtcttaaaggaaacatcaaattcagacagtccttttacaaccatttcatccatgtcggctcattatttcgcaccacagaagaataacccaaaattattagaaaacttggaccactataagcacttgaactgtggtcgtgcactgactaatgtgagcccgttttggtaattctcagctgtgtgcgtaattgatgtcggcgtcaccttcagaaacttcgaaattatgtgtgatcaccgtgtttcataattcatcacggcattttagatcaaaattagatatttcatttgat

SEQ ID NO: 29988 - DNA, 767 bp, Arabidopsis thaliana columbia
aagtcttattaaagagcgatatgagtctaggattctgaatttaacagaggcgatgttaatctctgcgaatcctccgctacagttgagcttgaagttggggtggccacattcttctctgccaggtttccataaggggtaattgagatctctctgactgccacagctaaaactttcactgcatcgtctataaacctcatcagctgaaaaaaaaagaacaaaatgggatcacaaaaagcatctaagagaaatagacagattgatcattgtgttttcataatgagcaaagtggcaaggaacagaaaaaaaaaaacttaggtcatgaatctttgagattttttaaatggtttttggattttagattttggtttttggatttgaaaaatcttagtatataatatggaaaggaaactacgtaattaaatggtttttgaaaaacaatggtcaatctgcacgcaaaaacttaccactatgttgatatggtacgcaactaactcctcctgacggtgaggttgcgttacagcatatctgtgtggtaccgttgaaactacagattccacgagtggatgaacattgttgacacggtatttcatcaatcaccagcttcacctcaaaaccttttcttagagcactttccaaattagtcaaattcaaccctctctcttctggatggaaactcgttggaacgttaactgtgaaactgttttggcaagaatattggtaatcacgctttgagacattgaaaaagtacctagagcaggacatgtata

SEQ ID NO: 29989 - DNA, 1162 bp, Arabidopsis thaliana columbia
caaagagaaagagaaacaagaaagaagaacaatacaaaagaagtaaatgagagaaaaattgagattctcatcttcttttttttctaatcaatttgtaagaatttcaaagtagagtttaatagaatctctttacggtgttaaaacagagatctacaattgtatcatgtaaaaatagaaacctatagaaagctttgtatattattgtagaggctatttatacgttgtttttactagaaggagaaaaaatcctaaagtaagttttcagttctgtaaaaattggtttttctatttgttacttattcagttaagtgaacatatattttatgtttattgatctgtatctatattcttgaaacaacataacttaaagttcaaaaagttataaacagatttgacggattctaataccctgaaatcgtaggtttttatatgttttcataataaacgttagactatccttattgatggtctcttaacataactcttagttaagagatatatcttatatctaacaaaagtgttttaagagacttttgttagttataagctattataagacatgtctcttaacttaataattgttttaagaaaccatcaataatgatactagaagaatttagaaataaaagcgtttcttcgaaaaaaagtagtcatctttcaaagttaaataaaaacaaaaaggataataaagatgggataacgaatctgaattctgacatgacagtgacggttgttgggctttccgatagtacaaccaaatgccacctgggaactgaagtgtacataaattggggtcaccggactgtgatgtttgagaatcttttgtaccatactgggcccatattaggcccgattactacaagcctaaattagatctaagcccattcaccgaggcaaaaacttttcttaccaaaatccgcccctaaattttgaaaaatcaaaatcaaacccctgaaaagtcaaagcgacggcgaaaggaagaagaagagagagagaaaaaaacgagacgacggtggcgatcgaaaccctgtgccctaatttaaacggaaacttggttcgccgccgttctgcgtcgcccggcggcggaatatgtgcgcttggggcgatgcgtttaattctcaccgtcatgtgctcattcattccttacctttattcatcttct

SEQ ID NO: 29990 - DNA, 609 bp, Arabidopsis thaliana columbia
tgacgtagatgcgccggtgatctcgactacgttcccggcgcgtaaaggtacacggtgaagtggcggaataagcaggaacgcacggtccttaagaacccttgataacatctgcttcgccgtctcgtctccgcgaatccaactacgcgcttcgtcatctcccatcgctcgtcacgcgctaccccggtgtcactcttccgacgtgaaagtctcggcgactagccggggataatggtgaattaaatatgggcttacaagaggaatgccttactaatgggccttaactaagttataatttaggcccaatagtatatattaaatgtgggcttgcaaatttcccttcattttatttaaacaaaaatttaaaaatttaacacttatccaaaaaaacctttaatagtaatacaaaaaatataagtttaaaaacattttttaataaaagaaaaaacaagtgttaaaaatctaaattaaatgtaaaccatattgaatctagaacacctcttaggggtttgggtgatgtaccaattagtttcaccaaatttaaaaatttacacttgccaaaaaaactttaaagttttatagtatatacactatagtctggagatattttga

SEQ ID NO: 29991 - DNA, 480 bp, Arabidopsis thaliana columbia
ttttcatcacttgtataacttgtaagttaaccatattgaactagaactatcttagaaatttggattttgtgtagaaaaaattttaaacttagtaaaaaaaatcaaagttttattagtaatacaaaaatatgagttttaaaaaaaaacaagtgttaaaaatttatattacgtgtaaaccatattgaacctagaacacctcttaggggtttggatgacgtatccaattagtttacacaaaacataaaaatttaacacttaataaaaagaaaacctttaaagttttaatagtaatatgaaaatataattttaaaatatttttaataaaataaaaacacgtgataaaaatttatattatgtgtaaacaatattgaacctagaacacctcttaggggtttggatgatgtatccaattagtttacccaaaccctagaaatgtacactttaataagaagaaaacctttaaagttttaatagtaatat

SEQ ID NO: 29992 - DNA, 493 bp, Arabidopsis thaliana columbia
catgacttctataagcttaagcaatgtaaaaaacagtatatacaaaaatcttaaaacaacacaccgagatcagtatctgcgactgatatcaagtatctctcaacggctgccatggaacggaatttattccctgttcctggctcaatatatgactgcaaacaacagtactaacggtattgaacgtttggactatatgacacaaaccaaatataaccaaactacctaagtatcagatatgtaccctgtctatatgactggaacttcttcgcggtttctcctcaacgatccatccatcaggtaacctgaaatctttggaatggccacggcgattctgtaaaaccctaagctgctgctctatagagttccgggattctcttaagtatctctcaacggaaacaagagaacggaagcgctttcctgtttttcgctcaacataatactgcaaagaacaatactaacggtttagccagagattcaatcctaaaaccaccaa

SEQ ID NO: 29993 - DNA, 1389 bp, Arabidopsis thaliana
cagtggttagtcaagccgtctgcatttctaactatgtaaaccaattggaacaaaacccaactaacaaacttcctaaaaaaatgtgtttttgtttacaagaagatcgaattcggatcatggagtttcatcatccaccaaaactttccctcaactcaggtctggccatttatatatttttaataacaaaaacagagcatttcatatgccacaacaccaaagctcactcaaaatcaaagctcttttttccttcgtttattctttttttccttctggccaagtgtaagtagagaagttgcgatggaccaacgtaagttgattcaacccgttgtaaactcatcctaatctagctctaattgtatatatttgtatatagtatagagaataattaagtgatttgtctgtttaagataacaattaatcataatcatgacttctataagcttaagcaatgtaaaaaacagtatatacaaaaatcttaaaacaacacaccgaaaccagaatctgtcattataaagccaacgatagctttaaagtacacaataagatttgatactaattaagtttcaattattccaactcgaaccagcaatctaaccgacgaaagtcaacttatataatgtttagggcttatttgaaacattggtcagtccagacagattcacaaaaggtattaactagatcacttccacttcttgaacttgcctcctccaaacattccatgcttcccatgcttgaacttcccgtgcttcccatgcttgaacttaccatgaccatgaccatagccatagccatgaccatggccaaaaccgtgaccatatgcagcatgtccgtaaggaccgtgagagctatgagctacgtggtgagctccataggcagctgcagcacctgcaatcatacccccaattcctcctgcgtgtcctgaaacaagtataaataacagcatgaataaagaaaccaaagtgacatttaacaccaaatatgatactaaatctcagattttagcaatgaacatacagacaatcacaaaacaacatataaacaacttctcctattttaacttgtttgtacagtgaccattacaacacttaactggcaaactacatgggagaaaaaaaccattagcaaaagaaacacagtacctgagtgatgagcaggatagccagcaggagggtaaccaccatgaccaggtgcaggaggataacctccataaccaggagctggaggataaccaccataaccaggggcgggaggataaccaccaggagcaggtgggtaggcacccggaggataacctgcaggcgggtaagcaccgggtggtggagggtaaccttgttgtgggtatccagcgggtggataatccccagggggtgggtatccacacgcggttgg

SEQ ID NO: 29994 - DNA, 1100 bp, Arabidopsis thaliana columbia
ttggatatttcagttattttggatattttagatatttttcggtcttctttggatattttcagatatttttttgtgttccagtatttttactattttatatatatatatatatatcaagtattttggattatttaatctagaaataactaatactttgaaaatatatttatatttcggatattttcggttactcaaaatatgtcgattcaataccgattcagttttggttcttttgattatagaatctagtatccattcgattatttttcaattttcactttgattcgattcggtacatttagtttggtttatttgtccagtagcttcaagtcttcaactatattgggcttggatccgataatataatctatactattaagagagaatgagagacaataaaattacaagccgtttaataaaaacatgttacaagaaataggaaaaaaaaataaaggataaaaccgtcattatctgtgctcttcgcagccgacttgagtcgcgcccgtaactgacctgttaaacagacgcggagatcctgtttctatctaatggggctcgattctatttcttatttggcgttttgatcacagttggcccatttgcacgtcagtaaccactctttcttaacatttcttgctcaatattttgcctcctttccaagatattcactgtttcttgaagatatctgcaaatcacaaccaattaaggaagattcctatattctattgagatagtatatttagttatgatttcatgtataaaaaaatccggtgttgctctagggtttaagaaccaaatcctaaccgtataaatactcaagcaatatcatcaattctaaagcatcacttttctttctcatctatacacataatcaatgacattaccgttaggtttaacgtatcttagtgatgtcaagcctttcaaaacgaataggcgtgtccgagtcaagattcttcatctgtggaggcaaaccatggatgcatcaggagaaacgttagatatcattatatgtgatgaaaatgtatgagagaatgtgttgtggtcgaattccctccacaagcaagaccgagccaaacagtctaagagtaacaatcacctca

SEQ ID NO: 29995 - DNA, 1094 bp, Arabidopsis thaliana columbia
gatattttcggttacctaaaatatttcgatttgtatccattcggttttggttctttcggttataaaatttaatatccgttcgattattttcaaattttcagtttggttcagtttttttttgcatcggtttcggttcgatacattcggttcggtttatttgcctaggtctaagttttctagataagaattttaggcccatgtttttatataaattttagttttgaaagtagtttggttgggttaggcctatatcaaattttaattttgttaagttgatgagatgacatggaaaaatagtaagttttattggtcaacgtaaatgaggtttattaatcgaaatgttctatatggctgttgattttaatgaggtgtcatgctgagaacacttgaaaaaggtgatgtgtcagcacaggagagacttttagagtttttatggtgttgaattagttagtcattttatttagtgttggaaatgtgtcacataatatgtgtataactaaaacaaaaaagaaccctctcgacaaggttgccctagccgacgaccaaaaatctccagatttcaaatcgccctctccggtgaacggcgctcctcatcgtagccgtgagagggcccctgctgcttctttcttttttgttgtagacttgtctccctcttctagttctggtgttcgatgttgaaggtagtttgcttggcgagttagacgggtcttcacagtgaggtttgttcggtgttcttctcttcaagagcgtccttctccttcccccaacgggttgtagaagatgaattttctgccattgtcagattctgccttggctagggtctcgtcggtggttgttctcggttctgtggccatgggttcttggtatcttctggtcggttttgctgaccttctagtcgttctctttctttgactagatagggttagttgtttagtttttgagtgcagaatttgtggccatcgattaggaagtcttttggtttgtttcgattttgattttgggtttgtggaagcggtcgttgcggtaatttcttttgggttttgtgacttcagagaagatgttagtaattccgaatttggttgatctacgctatg

SEQ ID NO: 29996 - DNA, 263 bp, Arabidopsis thaliana
ctcctaacgcttctctttcgatacctcctaactcttctccttcggttaaacttacgcctccttacgcttctccttcggtgaaacttacgcctccttacgcttccccttcggtgagacctgcagggacaactcccaacgcttccccttcggtgaaacttacgcctccttacgcttccccttcgatgagacctgcaggaactcccaacgcttccccttcggtgaaacttacgcctccttacgcttctccttcggtgagacccaca

SEQ ID NO: 29997 - DNA, 745 bp, Arabidopsis thaliana columbia
aatttttcaataacctcatccttgttaatgttttgttgtagatcagaaatcttttgggtatcttgtgtggctcgtaactattttgcggtcaggtcccgaaatgaggatggtcaagatgataatgacgaaggacttacatggaaatctcctgaggaagaagaagaagaattactaaatagaatcaaggaagagagcaggaagcgaatggaagccatactggagaaacataagaggaagcccgagcagcaaaatgaacttttaactcaggataatgggaaaggtattcgttcagtctttattgtgatcaccatatttcacgactctgatttcttcaaatatgaggttttcacctttctactcgtggtatatgtgaatggctctttaacaaaaagctgtaacttgttttcattagatttcactggttgatctcacagacaatgtctttgtccatacaatactctcccacgttcaaatgtaaaaacttgttttgagatgtttagcattgaggcattcccagtgattcttctgtttttgtggcagatattgttccagaaactggtgctccagtgtcgacttctcctgcagttgtcatagcagctaatgtaggccaggcgaaaactaacttggactttgatactgtcgctgccaaggcaccattaatagccggtggccacctactatgtctggaattcagactcagagaaggatcaagcgcaagcggggcttggtgaaggtagcccgaagt

SEQ ID NO: 29998 - DNA, 176 bp, Arabidopsis thaliana columbia
gaaacagtctatgagtttttaatgttttggtgatttgcaggtttccggacaaagaagtggggcaatttccaatggcatacgtcgtcaggaaaactgggagcagcttaacatagaagacgataatggagtttgcagcgaaagaagtagcaccatactcgacgacacgacgagttgca

SEQ ID NO: 29999 - DNA, 1092 bp, Arabidopsis thaliana columbia
tatgttagtctgttagtggtattgaggtcggttaataccgtggaccgtacttccttatcaccttgatatggggccagcatccctatcgagtatattatgtaaatattttgttagtatacggttttggtcaaccaatgttggggttgtaccattccgacacgtattgctggatatttggtcgttctgttctgatgttaatattttgtgctgttgatattattctgttatgctgatttgataatataattttggtagtataagctctgatgtgtttactttattttaaattaattaaattaaaatttatgtctattagtaccaacacgtgaatattattctgtacgggatcagaccgtgttggtacttgttcgtcgggtttgtagtctcactgggcaatttttcgctcatataagttttgattccgtgcaaaggacattgaggaggtggagcgtgcaactgaggtttaaagtttttagttcaatcgtaaagcgagacttggttgatttttcttgattgaaattattttgttttcgacatttggtgtttttatgaatttttaaacattaaacattattgaattttagtatttttattacattagttttagtaatactttcaaaattctaccgaattttggggtgttacagaaagtatagataagcttatgaatttatttgtgtatagtatcttattttaagaaaagatatactaactaatccagtgaatataaacgaaaatcaatagtgaatttgttgataccaaaatgagagagtcgtcaaaattcttcctcgtacaataatttatttcatgagatccaatcaaaatatcttacgtaaaaagacgtgatcatccaaactatcaaaacgtttacaacatttatcataatataagcaaaaaaaaatgttcttttgatgttgtaaaacctaaaagttgtattagagttatttgtagttatttattaaaattgaattatctgctacggtaattttataactcaagaaatttaaattattaacaataagtagacatattaaaacttctatctcaaaatattcagtaaatatttttaatcacactaaagtttattaaaag

SEQ ID NO: 30000 - DNA, 681 bp, Arabidopsis thaliana columbia
ctaatccgagttaaaacatataaaataataattaatcttgaatgaaatttacatgaattaataattaaaaaagaaagattacatgcaccagtcaacaagccagcattccaaacttttgggagttacaaaacgaccgttaattattcttaaaagaatttaagctgatttttttgtaaaaagttggatacttcaacgtgacataattatggttactattggactgttgcaatttcttttacattaaaatcttttttttttagaaacatttctgctagtaattgatatctacggtgttaattagcggcatattctctttattactcatggtttcaaaaataagattccttaataaatatgctgctatatcattacatcgaaaattcctagctctcaccatctttaacttattatattttttttttgttgggatcgatctaccctaacgttaaaacatctattccaacaaaactgcgtgcagtttttattcatgggatggcaaaatttgatattaacggacacaaatgctcaaggagcaatgaaaagactaattggtaattaaaaataaaataaagactaataagtaaattagagtgatacaaaacagctaaaatgagagaaaagagtagaacaatatgcgtagaattgagctgaccggtcatggtgacaagtggcatgggaaca

SEQ ID NO: 30001 - DNA, 1043 bp, Arabidopsis thaliana columbia
cggatttcctatggacgatttttatatgtgctatcatgatcaatatgtacattaaatctgattgattttctattaggattagatcaaataatctataatgataatgtagaagacaagaaaaaacggaaaacggccaaaattcacgctaatattgatttttattatagcaactttctaattatgcttcaagctacatgaaaatacaaaggtgacttgccaaaccaaaaaaaaatcgatagaaggcaaaactcacatatttagaccgtccatcaaaatctttgtagtatgttccaagctatggaaattagatgcgtaaattaaaacctcaagagtacaacaaatcaagcttcaaaaaggtttcaagaagccatcataaaaaaaggtaacggctctagaaataaggttagaagttcgtcgcataaacatcggcagaatctttcattgccacggagaatcgaaatattcgataaaaaaaaatggaatgagaattcatagttacatcaagtttggattgttagcgatgagagcccttataatatcataacttagatcacaaaaaccattggatgtataaaaccatttggcacaaacaattcacaggagcccaaagtcaagacttttgaccggcatggcatgaccgtattagaaagctacaacctgacatcgaactcaccagcgcgtgtctgagcacgaaaccctttgtacaaacgaggagggatagtttgaagatcaagtttctcgattcttaggccagaaagagcaatgcccattatcttaaacccgagtttgaatgtcggaaacacgtgaagccgttctaaccctggttccagcgctagtgttcccgacaaacacggagttttgtcctttgggattcgccgattgtccatgtacatgtctgcaaaacatagtccacaatcaaaaaacgtaagtttctaaatctggaaactgaattcaaagcaaaagccagacagcatattaccttgttagagaggattgttacagttccatgatttgatgagagatctgcagatgatcacagtgag

SEQ ID NO: 30002 - DNA, 722 bp, Arabidopsis thaliana columbia
tttaaatttatgaaggtttggattggtaagtacagggggtcagagttggggttgattttagccgttttccccatatcttgctacttaatcttttttgaattctcaattcgtataacctaacaattgttattttatttttagaatttcaacgtatcctacgatggaaggttttgcatcaaaaactgcaaacttatacttatgttttattcttagaattttaacgcatgtagttataaatgaaaacataattttttttttgttgataaaaatagtttctaggattgacttttcaataacttaacgagaatttagtaaattttaatttattaattataactcactaaatttattttgcatgtggtaaaattaactaacgagattatgccatatataaaaattataaaaatttaatatgtttcttttatatttttttaatggatttttgtttttttttcttaattatgttttcttaattcttaattattttattaactatgatatagattttatcggatataaatattattttgatatgaacttgttatcacttaagatgaagtctgtagaattcaaatgagtttattattatgaattgaaatagatagtttacgaatgtattgcaaaatagaatgtgtgagatgaaatttttttttttttgtgtaccaagatttaataccatactaatcatcctcaaaagagggaaatgttcaaagggaggagca

SEQ ID NO: 30003 - DNA, 591 bp, Arabidopsis thaliana columbia
tgtgtctctgagcaagtaatttgtgtgatttaaggagcaattttagcttttcattgattctttgttttaggattgttctagatccgttcttgagtcttgtgttgaggcaacttatagcagagcctttcgtctgctttgattgatggtcattcaagatttgttgattccattatcttatactgcaacttcctcggatcttctcatcatttgcccttgacattgtgtgtctattcttgcaggatctgccacgtactttcccaggccatccatggttggacactccagaaggtcatgctgctctacgacgtgtgcttgttgggtatcctttcgtgattcagatgttggctattgtcaggtacatgcctgtccttttttcccatctccattttctcaatttcaaattagtttgtatcttaatcaatgtcgttttttgttacagggtctaaactacgttgcagcgttactattacttgtcatgaagacagaagaagacgcattctggatgctagcggtccttttggaaaacgtattagtccgtgattgttacacaacaacttatctggatgcatgttgagcacgggtttcaaagat

SEQ ID NO: 30004 - DNA, 618 bp, Arabidopsis thaliana columbia
ctctttcatggtttcgttttgctggtactaaactcttacctttttgtttccatattttgcttttccaggcaacaatagcagaacgaggcactgctttcaaacaacattgtgaattgtcagaaacaacaaagttaaaagaaataaatctgtatgatggcttctctccctttttgtcttctctgtcaacaatcgtcgtagaacattatagaaattctcgtctgttattgtagtgacaaactcatgctcacacgttcagacaaagtaggagaagctgagatcgaatacagagaggtaagaagaactcaaaacaatccttgaaaattttgtagtaatgcttttgggtgcttgaacttgtggtgtataccgcaacaatgcagataaaagcagaaagtgaggaagccacgagaagatttgagaggatagtaaagagaatggaagatgagatagtaaggtttcaagagcagaagacggaagagatgggagtggcattccatcagtttgcgaaaggacaagctcgcttagcaaacagtgtcgcggatgcttggagatccttcttcccaaacttgaagcttcttattctgtctaaatcaaaactaaacttacctgtgtctgtgtgtg

SEQ ID NO: 30005 - DNA, 1035 bp, Arabidopsis thaliana columbia
cctccttgaactcaattcacgaaagtatagataattcgctattgcgacggaacctaactaagcaatactaaatcagaacctaaaccattgtttgactctaataaagcaaagcaagcattaaccaacaagattgatatgttcacaagattaatcaacttaaaatcatagaactagttagctactcaagtcgtagcattaagaacaacatagaataagaaccaacaagatgaactcccaaatctaacaacctaacgaatcaatcacatcccttagaaatcctatacctagtaagcaaactactcagacatagaatcaagaacaaagaacaacatagaagaagacatctttattcaagaatcaaattaagaagaaagcttcaaaaaagtttttgagatatgagatctctaagcttacaaaactaaagaaaagctactgctaaaaatcgtgtctaggtttacaaggttgagtctcatcgttttatagagaaagggaaatcataaaaatgtaaataatgagagaaaaggaaagtcttgagtcggcagggagggactgatcagtctcgggtgaggaccggtcggtccctggaacattcttcacgatctagagccactatcttcagggaccgatcggtctagggcaggaccgatcggtcctggcacatttgagagatcagactctcgggtctctaaggggaccgactgattctttgagggaatcgaccggtcctggcctcattttttcatacttgactcattttcatgccaggacgatccaaaatctcttttttcaaattaggcactttttagacctgtaaaaccacgaagtgtagcagaaagaactaaaacctatctaatataagttagttgactcaatatataatcctaaaacaaagactaaaaacgatagaagaggacacatcactttgtgagtgaatcaagtgagatgttttgtataaggggactatcatgcagtctccttcactcgaagcaacaacaagatatggtcaagtacttggttatttttgctccttcatcc

SEQ ID NO: 30006 - DNA, 1123 bp, Arabidopsis thaliana columbia
acactaaagagttaaataattggatgaactcttctttagactccgctatgatattttatactgatttaaggtttgggtctcggaccacaggttatatatatgaagatatttttattttttctgttttactaaaagaatatctgttttaatcagtttagtttttgacgttttctcgctatataattcaatgaccatgcatttgcgttttcttaaatatcttggagaagtattattcccacacaacaaaaaaacttggagaagtaatggctaaaacatattggtgtggtgtgatatccaaacatttacgtttcttgctttcaacgtcccttgctttgtcactaattgcccaaaaaaaaaatctaaagatatttgtcaaacttttttttgtttttttggtaaaaatatttgtgaaagttgtggacatgtaacaaattgaaaaaaacgtgtggacatgcatggtataacaaaaagtaggagatataataacaaaaacaaaaacaaatcggttgtttttattaataacaagtacgagatagatcagtgtccacccttagtccacgttaatggcatggcaaatggtttcatgcatagcttgtcttgtcttggttcgaaaaaccttaatgaaattccaaggaataaatatcgattcggtgtccatgtgactacctgtatatctctatccctgccttcaatgaaaactgagaggccaattttgttggaccacactaagagaggtggtaacgaataatcacatgtgggcaaagacgtcacggcgttgtctaggtttagacagtacagtttaaattaatatacatctataagttcttatctcatggggcactcaagctcctgtcacttctatttcgttcacatttcataattacagcaactttgagattaaaaatacacatgtagctttacgcgaatttgtagctcagtagtttaatttgtatttactgcttctgaaggaaatggggattcaatcttgggataatagagaggcaaattcatcccatctaaaaaatactttctgaagacttatactaaattttgatcataccaacggatggatgtgccccataaattactccatagtccatacctctgcctaatctgatagtat

SEQ ID NO: 30007 - DNA, 1512 bp, Arabidopsis thaliana columbia
tatcttctttataagagctttgatacatgcaaaatattggaaaacaatgttcgaacatataattttccccccgtaatatagcaaagatcacgaaaaggcccgaaaaagtacatttagttcaaaatttggagtagaaaaaaaacgaatagaaaattccatttttcttcctcagtcatcggagagctctctttgggctttccgaaaaggtatcacatgccaagtttggcgtcacggtctaaaagttatagagtcatacatttttaagaaaacaaaatagagtgtcacggatcaaaagagggatgcaacacgaggactttccgggaggtcacccatcctagtactactctcgtccaagcactcttaactgcgaagttctgatgggatccgttgcattagtggtggtatgatccatctgttactacattcaatgcaatcgtatctattcttttttgaagattttatgatccatttgccgtgggtcccaccagctatgtaggaataccctatctttttataagagctttgatacatgcaaaatattggaaaccaatgtccgaacatataattttcaccccgtaatatagcaaagatcacgaaaagccccgaaaaagtacatttaggtcaaaatttggagtaaaaaaaaaaaccaatagaagtattccattttccttcttcattcatcggagagctctctttgggctttccgaaaagttatcacatgccaagtttggcctcacggtctaaaagttatagagtcatacatttttagcaaaacaaaatagagaaaaacggaaaaaaagagggatgcaacatgaggactttccgggaggtcacccatcctagtattactctcgtccaagcacccttaactgcggagttctgatgggatccgttgcattagtgctggtatgatcgcatctgttactacatgcaatgcaattgtatctattcttttttgaagactttataatccatttgccgtgggtcccaccagctatgtaggtataccctatcttgtttataagagctttgatacatgcaaaatattcaaaaataatgtccgaacatataattttggccccgtaatatagcaaagatcacaaaaaggctcgaaaaattacattaaaatcaaaatttggagtaggaaaaaaaatcaatagaagaattccgttttgtttcctcattcatcggaaagctctctttgcgctttccgaaaatgtatcacatgtcaagtttggcctcacggtcttaaagttatagaatcatacatttttaacaaaaaaaaagagaaaagaaaaaaaaaaagagggatgacacacgaggactttcctggaggtcacccatgctagtactactctcgcccaagcacgcttaactgcggagttctgatgggatctggtgcattagtgctggtatgatcgcagtcgttactacatgcaatgcaaacgtatcaattcttttttaaagactttatgatccattgccgtgggcccaccatttatgtgggaatac

SEQ ID NO: 30008 - DNA, 497 bp, Arabidopsis thaliana columbia
cacattaaattatttatgtgtttgtggttagattctatgcaagcatttaaagtaaacggaggtggatctataggatttgaaatgacggaactagccttgccaaaaggaccggtcaactggattttataattgactccggcaagttgcatgaaaaagtaacgctggcggacacgtcagcattaagccagcttcattcacatgagatccacacgtgtggactagctgtcaaaacggacctgcacgtgcaaaggcccatgggtccatcatggttttactgggcaaaaatcattggccccaactttagtcttacaaatcatttttgccatttgctttcaatgattctgttcaggtgaattaaaagacagccgtaaatgaccaaacaagtttttttctttggtttgtgccaatgttgtcttcatgttatataattcgaatttctatttagaaaaatatgcgttttttttaagattaaattatggatatacacaatgtaggct

SEQ ID NO: 30009 - DNA, 548 bp, Arabidopsis thaliana columbia
gtgttctctagtactttatataatggtaaagtgtgaatcttgatgatgttcttcattctgttcaagtgtggacctgggtagagacaatcagtactactagtcttctactagaccctggaaagtttgaagatttgttactttcctgcgaaattaacaagattttcccgggaaaacagagggtgatcgatcaccgttcttcgggaaaccattactcgacggataccacaccggagaaactagaagtttcccagacctccacaccttccatacattcccgagaaacaaagagccggtcacctcctgcttcaattttcgaaatcatccctctcttggaatcatcttccttgtctacaaagtttctcctgcgaattggatcaccacttgtcttctccttaacacttgaccatacctctaatgcaccacctctggcggccaacacttgctttctgtaacaatgtaccacgctgtaaccacctccgtcgccggctttccaggcacggggattctcgtctgacatatataccatggatcttcactaatttacgaat

SEQ ID NO: 30010 - DNA, 414 bp, Arabidopsis thaliana columbia
gaggtggaaggtgaattctcatgaaacacagatatcaagatcactttgcctttctctactcaattatttagattaaagcaacacgtgtgacgtgtccattggtcgtgcggtatgggacgtaaggttgaaatcgtaattgtagcatgtaaacgtttctgtagtaaaacattgatgatatgatttcaaacggtctcggctaacatctggtgatcgttttacatggaatcatcgatgtatgtaccgaaatacccccgtgactgattgttagccacttacatgtgtagagggtggagagattgatcggacggctatgatttaatgaaggattaagattcgaggtagatctgtcgtacgttgactgtttgactacgagtcgaacggtcagaagaaatcgcgaatgtgaacggtacgtgg

SEQ ID NO: 30011 - DNA, 537 bp, Arabidopsis thaliana columbia
ttgagatcaacaaaatttatggatttcattttcgaattatcatttacaatatactctctatattttgtttaataatatttttagcaattaactttgatatttctatattattaactaaacatacatttaagtaaatagccaacaacatattaaatattacataaaatgccactacaaaaattcatttcaaaaaaacaattgatttacataaaatcatgaaaggtaaaaaattccactgtaaaagggtgttattggtttatgatttcaaaagagttttaatgacttaaagtgtaatatagaatctgatgttattcaattaaattttttttaaagtataattgtgttaacccgctttaatatttataattgggcaattataaattcatataaaaaaaattaattatgattattgcatttatataaaaaaattgaaaatttgaatatgattttttctattacaaatagggattgttagcttacttttaactgtttatttcttaattatactaggtaagtaacaagagtataagaacatta

SEQ ID NO: 30012 - DNA, 117 bp, Arabidopsis thaliana columbia
attgctatagcgagtgatggcgacggttgggagcacgtcagcgtctcaactcaaggacgctgcccgacatgggaggaaatgtgtcgggtgaagtcaatgttttgggatgttgaggat

SEQ ID NO: 30013 - DNA, 565 bp, Arabidopsis thaliana columbia
gtcgcatcgagtaatctgtaggaaacattatctttaacagttaacagtacaatgcaccactttggtactgcccttgttataatcaagagaaatgtacgaagtgagacagaatctttttctattagtggttatacgtttaacccttaatgtctctcaatgtccatctcatagatatctaatagctaaaagctaagttacctcatgctcatgtttcaattctttgcaagttgcaatgtgaggccaacaaagcaagcctgtcaaatcgttttcagtcgtatccttaaccctcgtgcaaatcttttgtcatcatttaatcttcttttgtactctttgctccattatcacggctcttgaccatatgctaacaaattaaccgtcaggctttttgggtgtactggacttgcttcttgggactgttcacagtctcggcgaaccgcgactgcataagattcccgcagaaccagaatatatcatgacaagattcagtattattgttgaatatccggaattatgaactttagagtttgtgttatggttacaattaacaaactttatttatgtacgt

SEQ ID NO: 30014 - DNA, 498 bp, Arabidopsis thaliana columbia
cattttccgacgagtttccgaccagtgaaatcgttgaaaagcgttggtcggaaacaaagtatgtatttgttggctaaaacgattgaccaacgtatttttatcgacttttcccgaccaattttcaacaaagtatattttattggatttgttttgtatttccgacgaaattcctactaaggttattttttcgaaattggtctaaatccgtcgaatcatgtctaaatcttcggaatttgtcgtcggaaatggttgtcggcatatacagtattttcttgtagtatatggttagaggagaatagtttcagtttcatctaaccgatttaaatatgatgtgatgaagtgtatgagaagtggcgatatgccgtttaggcttccatgtttattgtcaaaaagaattcagtaatttttataaaagcggtataatcgttaataaaaggttggaccattgtgccatcttgtaacatatgacaaaatgaccctccctcaggttaagggaaa

SEQ ID NO: 30015 - DNA, 815 bp, Arabidopsis thaliana columbia
ctgaggcatttagaaatctatcaacaccaaaacactaagaactacaaaatcagaatcaaagcacttaagattcataaaatgactcgcctgattatgagaacatccaaacgtcttgatgtatatcgtctgcgaaaaatcatcaagacgaaatgtaagtgcacgcaaaaacgttgatagatacagaaaccgaagcaaatgagaaaatgaaatcgagagaggagagtgacctgagttcctggaatcttcatcgatggtggagcaagcgagtcacgattcgaagcagtaatttgatccggtttcgagctaatacgtttgctcttattcgtcttcggattaattccgactgcattcaagggtaatcggaatcccggtggtgcacaccgactcctccggccaacaaatcctcgatatcctccattctctcttctctctccacggcggcgagtttacgagtgacaatggagtgtgtgggggttttcgcaacgaagcaggagaggcatagtgagacttaatgggcctgggtcgggtcgaattcatgttccattacaatgacccgatagagctataacagactaaagcccaactagtagtactcttcaagtaaagcaaaaatagctagcaaataaatgcagtgaaaaaacaattatatgaattttaagttatattcaacgaaaattattcatagctttagtaaagtaattttatgatatatatagacaaaatctattttgtattttcttattgtaaattttaactggtcaacactacttgtaaaacaaaaattggaaataaattgatttcaccaatttttcata

SEQ ID NO: 30016 - DNA, 850 bp, Arabidopsis thaliana columbia
gaactacacactcaccttcaagcttttgcaatgctctgaagtttacaattgtataacagtattctagagtgctcaaagcgcctcacactaagctctagaatacttatacctactctccagaaccgtaaacctaggatcttcgagaatctcgttttaagaaatcttttttgttttctccaagcttattccttcctaattgttcgagacgatatcttccatatcttctcggtgattcttgtctttgacaccacgccaagtcagcttccatccttggctctccacatcatccgccttagcttgccacgtgtgctctcgcatccatgtctgcaactcaagcgtttgataaaactcgatgcagcttcctgaaatccatcaacgctgtgatcgccatcagctgattgattgaactctacatcttcaatcgccccctttttgactgagtttgatactcaagcattccttcattgatataaccttaaactcaaatgagagacacaccacacatctaataggcatactgtagaaataccatctagtataaatatcataaaacgattagtctgaaagtgaacaatgtgtggaaaaaatattacagacccatgtttacgatgatacaatcatcggtttaaacaaaaacaaaagagaagttgttttggtctgaaatacaaccgagcttaacaagagaaacgaaacaaaaacacagctcccccacaagttaatctcccccagcatcatctgactccaaaggggccttatctccccctgcttgagcacataacttagtcaaaaatcatgtaaacaaccagacatatgtagtataagcttggtgctagattggcaaatcactaga

SEQ ID NO: 30017 - DNA, 564 bp, Arabidopsis thaliana
gtaacgtccgccagtgtgctctaaagggagagatgcaatctcggctttctgtgcggcgtcccttctcagcaaagatgcaccccggcgcacaggcataacaaaaggacgaacaacttaccagctcctcaactccggccaccttctcctccgcaatcctcaacttctcttttaactctgtgaggtccacattcgcctcccgcaaatcctccaactgatcttccgttttcttgaaccgcgcagtgacttcctccacctccttctccaaccgtttgttctccttctctaattcctcaatccgcccagattgcttcctatacacctcctgcacagcttccccatccgcacttagcggcggcaacgacggtgattttagcatcgcagacggcgacgttgagggaactccactaccctgcgacactgacgatttccggaacgacgatgagcgcatcttcgactgaattgagagagagggctggcgggtatgtcagcgcggggagtcggagtacctggcttgcagattcatttgagcttgtatctgcggtggtagttctgctgtggtggcgg

SEQ ID NO: 30018 - DNA, 425 bp, Arabidopsis thaliana columbia
tcgactctaatcccccgtcctttctcttctccttattcttcgtctccgttttgtttatcatcaattacgttcttggtgggaatttggctgtaatgtgtgctgaggctcactttatcgagtacatttgattttctgaggctcattttccttttttttgtctagaaagcattttctcacttattattggtgcttaaatttgaaggacaaaaaagattcgaattatatatcaactattaacaataatggagcaatacatttaacgttgatacatgatactctgttggcgttttacaaatcctagagagtcaaaaccattatccaatcgctggcttgtttcctactttgcatctctcttctcatcatcatcaatatcctttatagcatcctgcaacacacggcaagtaaaaagatatacatgagacaga

SEQ ID NO: 30019 - DNA, 1188 bp, Arabidopsis thaliana columbia
gcattacaagggacacaaaaggaagcgagtcggtattgctactaacgtaaaaaagcaggctcgtgatgcatccgatagagaatgtaagagtgagaaccctgagaatcccttcaacgcctgcacgagaaagaatgtcttcgcgttgccttcggtaaaagataggagttgttttgagcttaataggtttaaaatagagaggatcatcttctggtctgttgctagatattgaaactttagcagttggatcagccaaccaccgtgatttgatcggtggataagaaaccaccacgtcgatcaaacaatctagcccagcttcaagatcaggactctcaaacaagattttccatgaggctctcacgtctctgcatccaacaagatacattttcccaacatgctcatcgtaaagaccttccaagtaaagaacagagaagttaccgaaattttcccctgtaagtgagatttgacctgatacgttcagaagaagctgtttctcagtgtattcagcttttgtgcggtaaggagttgtctgatccgcgatggaaaagttcgaagtacgccagaaaagtccgaataaaggaccgagcgagagaacatccatgccgaaattagttcccgaggcccgtttctcggtaaatgcaggtgtatggaaagtcaagtcctcagcaagaagagaaaggctcgaaagcaaatcatcagagtcttctagtttcggaaaatgcattaccgacttcttgattatagttccgaaagagaactcttcgtttctctcaaggatagcaccagcatcatctaacttcgagtaactataaaacggatgcgaagccgaagagtggaagtaattctgcatatccataggctccacaagcttctcaaacgacaaagggaagaaagacggagtcaaattcttctcagtgtttaggcaggagaatgttcctacaagtatacttcgctgccttatcgaaaaagtagttggaatatacaaacaaatacgagcgttgcagccatcgacttggcctcgcctgcaaccaaccatacataactgcccgctagacggtttccaaatcccttcagctgtaacagtcatattgtctatccctgatctcatccctgaaatgtaaagattctcattcggatgaaccgctcgaaaaaccgccgagacttttgtaacagcatcggattgagaccgag

SEQ ID NO: 30020 - DNA, 708 bp, Arabidopsis thaliana columbia
tcagggttccattttttaatcctgacgagagcattttagaattcattgttgaaccgtttaaagaaattgctgtacttaggtcctttccaaataaaaattaggattcgagattatgcaggattactaatttaatagccaatttcacaaataaaaaccataatgtaatttagcattttttgttcttggttatatcgactaatttatacagttaaaatatcatccatttcaattcaatggaaaccttagtctttgaaaaaatagatgatacttgtcaaaataagtaaataaagattattcaggaaacaggttaaatatgttttatgttttttttgtgtctgcaaagttaaatatgattttatgtagaaacataaattcgttgtcaaatacaaaaaaatgcgataatttacaaaataaaaattatgacaacaatagttagaactttgtgaaataaaactaatcatataaatagtgttaaaaataaaataaaaataatcatataaatttccctcctttccatatatcatcatcatcttcacaatcacaagagacaacacttcccacaaaaataaaaaacaaaaaaaaataaaaatttggccaaatctctctctttttttgcttcttcgttgtagatgctgctggttgtctgaaaaacatttatctttcgctctgcgaatcttcctgtgcggaggaggaacaatgaacgggaca

SEQ ID NO: 30021 - DNA, 526 bp, Arabidopsis thaliana columbia
ggcgtcagacacaaactttattttaaaaatttataaaccaatcaaatgtttcagaagaagccattttaatacaatcaagtattcctcatatgatgaccttacgagtgattggagagccacataccaatgaacgtccaacaaaaggaagaaagtgacattttaacaaaagcaaaagtctttccaatgtttcttgctgacataggtttcagccacttagggttctactttgagatttagataataatttcaagaccttttcatctccaatatatgttcataattttcattaatatatgattgtttctctgcacatcatacattcagtgacaaccttatcttcagaccttgattatcttatttaatagtagcgagattcttctagaatagaaaagtacatagatttcttaacatccacacaagtaattgtcttcatagagtcatcatgaagtgttcaaactcctttagcgagttgtgtaaagaacctccaccgctaacagaggctctcagctcctccttcaaagtgacg

SEQ ID NO: 30022 - DNA, 547 bp, Arabidopsis thaliana columbia
tcttggaacatatccgttttgttgatatgatttatcgatttcgatgttttggtagtggctcgcagcatattgttggtccaaatcatcacctatataatcaaaattacattgttgtaacatactatataatcaacgatgtttcgcaattatagaaaaactgaaatggtgtttatgttgacactattttaaagtaataccctgtgtcaaaagagcagcctcgttcgctgttcgttcgcccacttctaaaaagttcccctttgagtaagcatctcgaactaagttcttaacgtagggctgcaacaaaacattaccatagatgaattaaaaaaataaatacagtttctaactaataaacaatcattgagctatcaataattgcttaacttctttaatagagagaaaatgaccattcaatacctggttgagggattcttgactagagagaacatgaccatcgataagtgctttcataacttcgcatatcggattcaaaatcatgaaaaaattcggtcttctagaaatgtataacttatttcccaaaatacac

SEQ ID NO: 30023 - DNA, 590 bp, Arabidopsis thaliana columbia
tgcaacttcttgtagcattcgtgcacagcaacacttttttggagtaatctcagtcaggagtaaaatagccacctatatagtcacccaagaatggcaaattcttaggaagcaattatactgatcaaagaatatccagacagaaacaaaagaggcattgtactaaaccaaacaaaaggattataaagtttacaggtatgaaaaagtgttgaaacaattatacatactgtcatcaatccagtggcagcactaacaccagcttccccaaatatagctgttgctgcttcagtgaccagtgcagttgccgcaatattcacaacactaagaccaaccacaagacctaagataagagacaatatttatagcaatcctctaaagacgattcatatctaggaaaaaacaattacgttgttccaataagtatagtcgtcaagaatctggtgacatcactccggagcattctgaatacaccattctctggttctttctcagccaactcacgcacctgagataagccgtacataacacagcaatatgtcaaaaccaatcagaatcaacattataagaacattggagaccaggcaaaaaaattg

SEQ ID NO: 30024 - DNA, 479 bp, Arabidopsis thaliana columbia
gactcaaggttcatattagggaaaggagagtgaggggaagaggcgctacctgccctcggcccgatcatccaattcgctccaagagagaggcatggttttgtagtcaaagcaacttcgtcactttcgtgtacccatcggacggcagccctttcgggggttccttagggaccgattcactctgcgtagattgactgaacgcagaaagccttccactggcaggcgatcgtgtttttcacaggatttatcgttactcatgtcagcattctcacttctgatatctccaggtcttgtcaccaaaaaccttccccgattgacagaacgttccgctactgtggcccaaatttaaataaattcaataaaaatttgttgattttttgtggccgttgattaaaaccgggaaagcagcagaaacaaatctgaaaatctgagttaagccgaccacaaaacaaatccactccaaacactccaaattacttgtc

SEQ ID NO: 30025 - DNA, 501 bp, Arabidopsis thaliana columbia
  unsure (1)..(501): unsure at all n locations
tcaacaaaactcaaaattgttcttcttattaaaccacaaaatcatcatccatcaaacaataaaaaaaaatcaagtattgtaagctcggttccaaatattatgcgagcatatatcataaaatttcgcaacaatcaacagaataactgatcagtattccaaattttttttccgcacatctgttttaaaatatttcaaaataatgtatgtttaatattttatgctttgaaataattattaaattgtatgaaataaataaaataatttttatattaatatctttttccagagaactccgttcagagaacctaccattggagtatgaaaaaccagaaaaaaaataacacaaaactctcttacttttttttgaaaatttaatcaataaaaaatggagagagctctctccattggagatgctcttaggacgtatttttaacgaaagtccattacagtgtaacatttctatttgagaaaatgacganaaaaatcgtacattttttgtag

SEQ ID NO: 30026 - DNA, 583 bp, Arabidopsis thaliana columbia
tgaatggaacagagtatgaaaagactctattgagagaaataaaagaagtgtgctcggttccaagacgacaatccaaaaagttaccgtcaatggcaaagctctggagttcattagaaggtatgaatggaagggtttcaaacgcgagaaaatcaaccgtggagatggtttcaccagaaacaggctcaaacaaaggcggattcaacacattggacctggttggtcaatggagctcatcaccagactcggctaatgctaatttaaatcgaggagggaggaaagggtgcatagagtggccaagaggggcacataagaacagcttgaagacaaagctcatagaagcacaaatcgagagccaaaaggttcagctgaagcatgtccttgagcataagatctaggccacaacatattccaaaactaccagtcctaggccattctactaatctttgtggctgagcagcagaactggatttttgatcccgttctcctgctattgccattgtcgcatgatctagcgctggtcaaaccaatcaacgtggtatattttcgttagctaaaaggaaaatgatctttgtgattgattact

SEQ ID NO: 30027 - DNA, 950 bp, Arabidopsis thaliana columbia
tgtatactggaaaacatatgtcattcctttttaaaaatctccagttgttttttcccatattcgtggaaaaataaatcgagtcttatgggcaaattgatctatttgatgctttttgaaaaaaagaaatatgactacatttaagatttcaattgattattttcaatatatgtttcacattataaagtacaaacagtgcgcttgaaaaaataacttttgcccaaaataaaaaagaaaaacaaatttgattaatatttaacattatctcattgtttttttttaatagttactattttcttacttagctaagttggaaagtcagtataattttataaagatgtattagttccatgtatgatcactacccacaatcacactaattatgtcccaattcctcagacttaaacatttgacgacttagaaatcatcgcattgcattgttagagtgcaaggcttttataatcttgtgaagttttggttaaagtttaataccaaaaaaaagaggataaattttgcagtgtcaatttttatagtaaatctacgacgtgatctacccaccgcagcgtacaacaaaatataaaatcaattttaattatttttgtaatttatccaaaacacacaacgttttaaagattagataaatcgtacgttactattttcgctgtcacgctgtgcccatttgtacatatatataaatccaagccacacataaattagtactatttttttttggtaggcataaattagtactacagtattcacataaaaccaaatcaacatcttttttaatatatataacaccattaaaagacatgtacgggaataacatacaaataaattaccgcgttaataatgtgatgtacgaaagatttcatttgtttttaattttgattgtttctgatgctgtttcatggaagcttctatcgttggggaaacagagaaggaggaaggaa

SEQ ID NO: 30028 - DNA, 579 bp, Arabidopsis thaliana columbia
tgaactattaatacacatatatcaaaaatataaaatacagaaaaagacaaaacccaaaataaaaaaaacccaacattgttcttggttcaacacaaaagaaaaaaccaatcaaaccaagtcaaccctttaattaaaactttcagttggaacatatatatctctgtttactttgttttgttaatcacaaagcagcatttagaacacttacagagattagtcttgtatgtctacattgttactctctttagatctcttagagattaggtttagccagttcaacgtttttctccttaatctctaaataattcttctgttacaacattacaacatatttaatatcttattatccttaacctaacaacttttatactaaacaaaacaaagccatttctatttgggctttacttatcttatggcccaattgacttttcttctttcttctatttcacgacgcttcttcttcctcctcgtacaacgggcttcttcttcctccattacttactcaagtatcttttctcttcatcatcttctcatctttctcttcaagtttctcttgtatgatattaagcaattaataga

SEQ ID NO: 30029 - DNA, 506 bp, Arabidopsis thaliana columbia
ggtatggagtttatgatcttaacgtttttggaaaagaaaaagaaagtaaaggacaccactagttatgggtcctccttttcgtcacattgggcggattgggtcaaatatacagtcattgtgaaaaaccagctcaataagcttatacttcatatattagacttgaattagaattgattctaactctgaatatctcaactaaccgttgtgtgttctctctaaatttgggtaatagtgttttggggtttgggagagaacgacacaataaatgagaagggatcccttttctgtattttaaagcgttttgatagggaacttgagaaataggatttcatgattcgtgtacttggttgttatgtctgtgactcgtgatgtttggctcgataatagctttccatagtttttgttggtgctttagtctgtggaaagtgcttatgattagggtcgtttacgccaagttgtgggttgacttaatggtcacatcagttgatagtgaaccaacagtgttg

SEQ ID NO: 30030 - DNA, 478 bp, Arabidopsis thaliana columbia
ttcttttccaaaaacgttaagatcataaactccatacctatatacattaatatgaactatgaagtgtcgtctactttgtatgaatgttgctctcatagtctcatctcattatttatttttgtcctttaaaatgacaaaaagatagtgacatttattatttattttttgtttccgtcgcttgtaatatatttatttgattaataaaatgggacgaaatcacaaatatatattagaagaacaaagaacaatagatacaaataatagtaacattatattttactcataagaatatacttcatgtgtggcacatgtctcatgtagtccatacattcgtgtttttttttgttgttgcatatttgatatcttaaacactaaaatttacacatgattcatgaatgtcaaagattcatttctccctagtgcttctttctctaccatcaaaagaaaattcatgactaataatccatacaaataatag

SEQ ID NO: 30031 - DNA, 547 bp, Arabidopsis thaliana columbia
gtcttgacttcaaagttggttggatcatcaatatcagcttggatactatgagatcccagtggagtctcgtgcatatcgttgtactccatgttaacaaaaaactgaaaagcatccaaatcaatcaaagccatctccactccatgtttagcctcctcctttccaaaaactgaaagacatttttcttcctacaaccacaaaaaaaaacaccaacgaagatccaaatcagattggacgattatagagcaaccgaagaaggaagaagagtcagcgtgaaaatcgaaaacgtaccaaaaactgtaaaggttataattgtgagtcttttgactttggttttgtacttcaaatactaatgtcggatcaatgatcatctaatcgttaaaaatcttcatggttcaaaacgaagtgactattttaagaatattcacgcatggtacatgttgttttatcaaacccattgcgcagagaaataatttttctttgataacatagtagattaattcaaatatgatgcgaatcgttctcttcaaaaacttagcattagcaatgt

SEQ ID NO: 30032 - DNA, 1226 bp, Arabidopsis thaliana columbia
agtctttcatacttacaaaatcaaaacataagatgcacggcgatgtataactgcaccttaaagcgctcattcgtaatgttgtcgcattcagcatgaacccgtcccatacgttacacccatcacaacatacctactacatcaaatcaagccagctacatggatgcaatagtttattactcaggtcagtaattcaccaaacatggtcaaagagattctcacccaatctctatcatctggagggtgccatattctcttgcagatgccacaatactgattggatttccgcaactgttacaaaaatttggattcaattccttttgatcaaagaaaactgaagagtgaggaaattttgataagaacctttgaacagtatttgcataaaagctcttccggctgtgagtctttagtcctttttagagattttaatggcattactgagccacaagcgtcgcgtgtccttatgtcctcatgacatgaaccctacacagtaagtaaataagcaaatcgtttagggggtgtattcccaataactgtacgtccatgcctatgcagtatgtataaatgccttcatgacgtagaacagaaagtatatcaccagacgcagatgctacaggatgcttacagaactgattatgaattatacaggatgcttatagaactgttcagaattgatttacttttgtcttcccaaatcaattagaagagcaaacttgaacatctaacccaaaaaaaaaaaaaaaaaaggaatatgcgtcaaggaaacgtgcctgaaatctagaagcaggtccatagtcctggtcggattccgtcgcagaggaatctggggagctgatttcagcatctacacaattaccgtcgaccccattttctgctaaaactgcttcctctagtgccttcttaaattcacttggcttgaaattgaacaagtttctctgatcctgaaatctgaagagatgaaaggctatgataggttacgggtgacgttggctggtgtgagaagaagggcgagatccaatggaaggaaaggcagagcttgtgagaagttcctgaggaagcttctatttaaaagtggctaaggcacagaaagacagctcgcccgctcggctcaggaagacagctcgccagctcgccgactgtgtcgttttcattttgggttatcgaaatgttgcgttttgtattgcgtctcagtagatgctgtttaaggaccttcccttttagggttttgt

SEQ ID NO: 30033 - DNA, 231 bp, Arabidopsis thaliana columbia
gaatagtcttcaaattgtctagttaagctcttctcatctcaagttttgtctcatacatccttaagagttccaactctaaggtcactagttatgatttagtgaatgatatcatccactttgtaagtaaccgatggtagtggtttaggcttttggtcatgtttagttccttactgattcacaggttaagatgcggagagttcttactactgttagttggacacgtaaatggga

SEQ ID NO: 30034 - DNA, 914 bp, Arabidopsis thaliana columbia
gaaagaaataagcagtaaacgcaactagtcctgaagggattcaattaattctaaaacttaaccattttacagactacggattccacaactactctatccaatccctaagaattctaaatcactactcagacaacatgctcaaagatataaacgcagataaatgataatattgcataagtaaagagataaaaagtagagaaacaagatgacagatgaaatcaaatgtggaatctgaataacttggaaaaatctcgaattacaggttgcagaagcaaaagcggcgcacgagagtaaaacagaaaataaaactgaagcaaaaactcaatgtcgactagatgtcaggacagaatcctaagaaatctatttatacaaaacgaaataaaatgatagtagacgggccaataacctaatcgctcggctcatagagtgataatgggccgagatgggcttcgtgatccgatggaggtccaggccgcttccaaacactttgtcttctcctattctctttcttgtgctcagcttgtctggttgagtgcggatttgagtagactgtgaagacgtgatcgagtgtccggtcgagtgacggtgatggtggtgagtgatgatactcgaccagggggttgagtaacatggtagagtaaatggccgagtgtggtcaggtggtgtggcgaagtgattatcaccagggggtcgagtggcgtcatcgagtggcctgagctgaggagtacaccagggggtcgagtagatgggaagaatggctccaaacgctccgacctgggggtcgagtatggtgctggatgcgactagcccaggtggtcgagtatgtcgtctggttctgggatcgtttcttccagcttgctcgcaaacagctccaaatcacctgaaaacaactcagaaatgcaatatgtatgcag

SEQ ID NO: 30035 - DNA, 198 bp, Arabidopsis thaliana columbia
  unsure (1)..(198): unsure at all n locations
cacagatatatagacacatatagatcaatatcaacacatcagaaccagatatagatacagacatagatatacacacagacacgagacacaacatatatatacatagatagatatagagacacaatatatacacacaacatacatacacagatatacatacagnacagaatcaacacatacatagagatacacagagat

SEQ ID NO: 30036 - DNA, 599 bp, Arabidopsis thaliana columbia
cccatcaatatatatgaaatcaaagaaaacttttttctttttaatttttaataaaaaataatattttggtgtaataaacaggagtggtcgaaaatgagtataaatgttcggaaattctgtttcgaaagagtaagtgtgattatcaagagtgtgggttgatgtgtgttttgaagaggcaggggttgtcaagttgctctaatgaggggcatatgttcttgccagtatcaatgcccttaatttttattttttactatgtaaatcaaattatatgtaaactttaaagtaatttgctttacatgttttttatatatgcattatccattagaatgtattgtttctgttaaaaaataaattacaatttctaagttagtaatttaattaactgtttttataagaaagtatggtaaaacgcccggagatgagattagatgcaatgtggtggatattttagcatgggcagtgaaattttgctaacttaattctgtaacaaaaatgtgaaagggaaaacaatgcaatctatttatttatgtatactctactaacatgtatatgaatcagaaccgatctagttgtacctttttcatacatttaatgaaata

SEQ ID NO: 30037 - DNA, 527 bp, Arabidopsis thaliana columbia
tttttcttttgatctattgtcttctcgcattggtttttttcttgtttacagataaattacgagccaaaggtgtccaactctatcaagctgctctgaaaggagattggaaggcagccaatggtataatcattgaacaaaaatatattatctatcaaaaaatcaccagtaaatcggagactgttcttcacatcgctgttgctgcaaagccgaggggtttgtaagaaatctacttggaagcttggagtcaaatgacttggccttgcgaaacgtggacggcaacacagccttatgttttgctgctgcatcgggagtcgttgagattgctaaaatgctgatcgagaagaataaagatcttccgatgattcgtggaggtggaaaaacgactccaatccacatggcagccttattcggtcatggagaaatggttaaatacctttacaagaatacacgctttagagaattcaatgatgaagagtttgtaatctctttcatgctgtgatatcagctgatatctatggtaaatatat

SEQ ID NO: 30038 - DNA, 593 bp, Arabidopsis thaliana columbia
cccttcctgaattgcttagaatctttcctaaattttgtaaattccttcctgaatttttttaagtgggaaaatatggacgtaattttttggtggaaaatttttgacggaatcttgtttccctgaaaatattttggcggaaaagtttttaccgaaattttttggcggaaaaatcttgtagagaattttttagcggaacaataatgtcgggaatttttggtaataaatttgtgtattttttgaattttttaaattgttgagccgtgagcaacttcatgctgaggaccttccacgaatgggtgggccgtgagcagcttcatgccgttcctctagcgtccataactagaagagccaccggcgaacgtcacgtatccgtctggaaagcctcgactgcatcaccgacaggaagtatgtcgatgtctaaatcactgcctcactcccgtcttccaatttgcaatccttaccctgtaattaagatcaggaaactcataaactatatctagatcttcgtttttgtcttcaagagtgagagagaaaagcgtcaaaaacgaggcaacgattgtgccaattccttcccatgtttggaaagtttattt

SEQ ID NO: 30039 - DNA, 502 bp, Arabidopsis thaliana columbia
tatttctttacttaattttcataattgtaagtatttaaccttgtgtacgattaaaaaaaaaaaagtattttaaccttgtgtatcattcataatgtaggttttctttccattttgaaaaaaagttttgatattggttcgcattcatcagttgaaaaccaagtcaaatttatggtagattggcaatggacaaacacaaaatatcatctccatttattgccaacctcataatgccaaatggtggaccaaaaggaaaaacatgcatttatttattctcttgacataagagaaaatgcatttaacttgtcaaataattgcaaggaaaaactctataaaaagatagaaatgtgaacagtataaagtaaataaagaaatatgtgtacatgaaagacctctccaatgttcacttgctccagtttctccaagattagaaactgctacgtctctctctatagctccctcgttttgctatgtggtaattaacaacagacaacagtttttgttt

SEQ ID NO: 30040 - DNA, 542 bp, Arabidopsis thaliana columbia
atgaaaaagtatggttgggaacattttcgaccttaccagtctctatcaccctccattatacatcctcctatataagaaatctccaaacacatcagtctcctaaactcttaaaaaaagctctctttgtggatcacgaaactatacacaaattcacacataaaatttagaaaatatgggaggcacaaaattgacccatgtgaccaccactaaccctaataactccaacattcatggaccagtcgtagacgaagtagaaggccttattaaagtttacaaagatggccacgtggaacgatcccagctcttgccatgtgttgatccctcactacccctcgagctcggcgtgacttgctccgatgttgttatagacaagttgaccaacgtatgggcacgtctctatgtcccgatgaccacgaccaagtcgtcggtctctaagctccctttgattgtttacttcacggtggaggattctgcgtcggctcggcttcttggttgtgtaccacgagttcttggctagattgtcgctcgctcgcggtgcttgg

SEQ ID NO: 30041 - DNA, 560 bp, Arabidopsis thaliana columbia
gtaccgattgtcaccagtttcgtgaggagatttggtagcaaactaattgttaaatgaatggaatataaaaggaatgatttggggggagtaatcagggtggtttgatgggtagatgactgaagagattatgatcttattaagtatcttcatttttattgtattgtcatttgatttaaaggacattgtcattgttattttcataactgtcttttaacgttattcctttttcatgtattttcatttgaacgaaaataagcttcatatcatgttaagcaatgggcagagagttgttttcatcattatgagtgtcatatgcccaaggaagacaagggttctataccttgttgggctacttttggttatctttgggatttggtatatggggtctactgttcattagttctctttatatccaaaacaagtgaagacgttgcatattggataaaacaggacatagtttcgttatccatctatagaaacacatttgtcaatctgtttctttgaattgtatctcgtatttgatttaccgtatttttctaaatgttccattgtttgttgac

SEQ ID NO: 30042 - DNA, 467 bp, Arabidopsis thaliana columbia
tgctctgcggccacttacaaagcccgacgtatctgccctgtccatcttcaagaatgggaaaacagcactatcctgctggtgttaatactgtaaaccgaagaatgtttgttggagattatcaggttccgctgaaaagcaatgatctttgttgaagtatgctactgttgagaactgtccacatgaccctgaaaataaatccagaaaggatgcaacttgagagttaacaagaagcatgaagagcaaagaacattgtacaatcaaaaaaaaaaaaaactgaaaggagcataaggctgaccgaagcaaagaacaatcaaaggcatttgaagtagtagcacaagattggaagctaagtagctaagtactctgcttgagacatctttactcgaatatcattcatgatagaacagaattggggaatggtaatcaaatgatataatcaaaatttacaaggtccaaagtcaagattt

SEQ ID NO: 30043 - DNA, 1227 bp, Arabidopsis thaliana columbia
tgcgtggagctgagagaatcagcgcaaacgcaaaccgtttgttctatgagatcgatgggaatcttgtagactgaggtttttgtaactgattatgtgaaatttgcaagcaagcaagccaggttcccttatttcatttgaatgttatttgcttagtgtggaatgtagaaaacactaaatgaagctcttgtgttgagctaaagtacatatttcatattgtatactctgtttcttattgtctcatcagcttttgttacatcagaatattggtcagtttttatgaatgcttctcaagttttcacttttggccattgtttttcttagttctgaaattgcaattgtgtatattggacggttggatttagaggctcaattagccgcattaactaaatatgtggctgtgattcatcttactcaagacgacagcgttttaaactcctttggacattggtcttacttgccacgtgtcacatcttctctatcgagtacaaaccgcaagtgaaacagagtaacagagacgcgtcgtcttcaacgatgctctcaacggtgacggcgacggcggtttctcgaccgattctgaaggtggaatgtacaatcaaaaggacgtttaaagtgacggcggagaagtttccgacgtttctgccgaccgatgtcgagaaaattaaagacacgtttgctctaaagctcgccgccagaatagagaggcttcctgtatctgtaagtggcttgagattccacgttttatcattctgaaatttcaaataatccaaggtctgatcctttcatgactgagaatttgagcttatatacaactacattttactgtcttagctgcaacttggccatgtcacaattcaagtttttgtgattctgtatttcttacattcaaagtttcaagtgagtagaaacatttaaagcaatgtaagaatcatgaacctgtagagattttgctcattgtcttgttaggtgagcttcagggaagatagtattatgagcagttgcgtgacaccgctgatgcggaacgagacaactcctgttgtgcttcttcacggatttgataggtactaatcaaaatgttttggtttgttgaattagtgtcttgagttttaaaactcttgtaaaacagttcttgtttagagtggagatacacttatccgttgcttgaagaagccggtttagaaacatgggcatttgatatccttggttggggtttttctgatttaggttttg

SEQ ID NO: 30044 - DNA, 504 bp, Arabidopsis thaliana columbia
agttttacaataaatcacattaacttttctaaaatcattaaaattatataaaaaatcttgttagatccgatacaccctctaataataatatcattgccaagtattgaaacttacgtttgttatataatgggtatgtagtttactaacaattacgtgaagtgggccgttaatttacaatatatttaaaattaagcataaacgcccggcccaaaatagagaagggtaatatagtaaaagcggaaagaaaggggttaagaccctccttatccctaatagaccggtgcgcgtgagagctaaataatcgttcgtgatatcgatttctctcccgtctcgtttatctttcggggctaaaaactcgaaagcaacagcgatagagagatttggagaaaacaaaaataataaaaacggaacggcaacagaaaattaaataatctaattagaaactcccgccatggtgaagcagctacaagagcaggaggagaacgatcccgtcgagaagacaaa

SEQ ID NO: 30045 - DNA, 522 bp, Arabidopsis thaliana columbia
aatatttactttgccgtataatcgaaactttcgtgtctctgtctcatttctgggtacgtatgtaattaatgtatgcaagcaaagtaatccattgttggagttaagttccctccagtagcccaaatggaatgggcctcgttaagtcaaagttccataatgaaaaaagcctaaagagtgaaaaaaaaatctgaattttaaccgaaacaaatttagtttggttcgtaaataaaaccagaaccaaaccgaaccgacagtaccaaaaaagaaccgattgttaaatgaaagcgaacaaccacaagaaataaaatagagcagaaaacttttttatcaacgatcaatggctaccgttaatcagcagctttaccggccaatactcaccgccgtcggaagtgactgccggcggatgtaaccacccgtttcctccctgttccgagacgcaacgtaaccactcgtctacggccaattttgagtcttgaggtgggcaaggaagtggcttcagcaccgtcgacagtgtacatggaa

SEQ ID NO: 30046 - DNA, 624 bp, Arabidopsis thaliana columbia
gaaagtgacataacataagtgtttgcatctttctaactcccttctcttcagcgtgccatcaattcatcattttgttcgtttcttattttttgttctactttacctcatttcccctcaacttctttctgtatttttcgttacaaacatggttacattattccgtcttgtcaatgtacatgtgcatatgatagatatatagatacgtcatacgtagaagtatcaggtcttttgttgttgcaatgctatttgaaaaatagtttctaagttttcttgatccacttaacttaagcatatacttcaaatctgcatgaaacattatgtcttttgcgttttttaagtattacgatcttcattatcttaaacgggtctttttattgtgtatagacaactggagtattattctaaatccagttcctaaattcaggtttaagccctttgcaaggaaatatttgctgggccaatctttcaaaagatctccatcaattgttttgttacaggtagaatataacagatatacattgtaacaaataaatattttgttcaaaaatgtagccaattttggataatccttagatatagaatttttgtgactatattacgcatttagaagagaaaccgtacatt

SEQ ID NO: 30047 - DNA, 813 bp, Arabidopsis thaliana columbia
atcttaaaagtcgccaacaatatacctttggacgtgtattaatctttcaaactttataaattagtataaatgttattaaaactacatcaccaacaatgaaagtttatatttttaaaaattaaaaacaaaaatttcaagattaggatcacaaaataaagacattcaacatcatgcgattcaaaaagaggatctgtctcccacggaggcaccgaaccaaactcgtcgtcacacttatgcgaagataacctatttttttaacaatgtcatcaagagaagaaacctagaaagcaaaagagatttggttttccacagtatatatttatcggtttgttaaattataaaaacaattgccgcacaatttgttaaatatgtaaattagggggatttgcaaaagtaccctttttctattaccctattgcaacaatagttttttatgttgtccaaattatcctcaaaaagaaaattttcccgccaaactttgttttctcgacaaaattttattttctccaaaatattgttttccgagccaaatttttccccagccaaaaatgcatttaaatttttttatatattttcttagaaccctttaaaaactcttaaaaacttaaagtttttaaaaggtatgtaaagttgttaaaacccttataaatcattttaaacctttaaaatcttgataaagtctttgaatacatatgtaagtacttgaaacccccattgtaaagcctctgtacatcattctacaagatttacaagagttctgacagaatttacaaggatttttaaaacctttgtgataagtgtgtactttgcatg

SEQ ID NO: 30048 - DNA, 960 bp, Arabidopsis thaliana columbia
caagatcatcactactcttagtagaccttacacataccaagtggtgtatctttaccggtttcagggaaagattgtgcttgtcaagcaaacgctgaggaatgagagagaggttgggcgtgagagagagaggaacgctaagaccaccaaaacccattcttgttgcttccatgttgttactgtaaaaaggataaagacgaaaaactatttagagaaactctgttcttaatgtttgcgctgatgcttcaaactttcaaatggctgatttgaataaaacaaaataaagtaactacgaatcgtaattagtggttttttttttttttttttatggttggacacatattgcgagggaaaatgtcagacgaagatttagtttgatttagtgggaaaatccaagctattattaaattctgtaatgtttgggttgggcacattagtgaacattaaaagcattcattagacaaatcatttaatatgactgaattatgttgagaatgttagacaatcatttaatatgattgaattaattgagaatccaagcaatcaatgttcaatctctatctctgactggcattaagttcgttccaagttacgatacagcagtgtttgtgaatatcatggtctgcattcaacaagaaccacatcgggtcaactgtggtttttgtctggaattcgttcttgctgctgcttcaataacaaaaattcagatctttatactctgttttgggtgaagaaaacccataagctaaacttgcgctcacgttttagttctgatcatctgaatccttacgctacgatttagttcctatgagcaaatcttattgatatttttcgaacattacattattaagattcaaaaacataatacaacttgaaaacaaatgagagagatgatcacacggcatagatgatttataagaaacaagaccatagatctaagtaaaaggacttgttaggagattg

SEQ ID NO: 30049 - DNA, 940 bp, Arabidopsis thaliana columbia
gaaactactcaattaccccatcctcgggaattctttatctgattgaattctttgtttactctactgttgtttactgcatcttgtcatctgttccttagtttctgcaattctttactgttactcgacctgatactcgaccacccagttgtcgggcaacagactgtgcagtcgagtatccctgttatactttatgtctgttactcgacctgtcactcgatcccacccagtgctctgcaaagagctgtgttggtcgagtgttttattgtttctgcttgaatttctgttttcttcatgttcacttagaactgctagaacacaccaaaacctgttattgcttggtttgacttagtgacttctgatcacatcttgattattagcatcacacccatttggattgacaacctaaaatactacaacgatatgattggtgttttaggataattgactaaaaaacctattatcagctccaaacaagaaagagcgacccatcagaacaacaacccatcagactgacggctcgtcccaaataaagactgctcggcccaacgacatgtcatctcgggccatcacagctcggcctagcccgttaaatttagaagggcagaaaggagaaatcgtaagagagacaaagagaaccctagatcagctccttgcctataggtccagaccctaagacactactcagagaatttaagagagaattgctgtctaactctttatatcttattttctggttttccattctgtacgtttggttctccgttctgtacttttggttatccgttctgtacttttggttgtcggctttgtattttctggttttctgttctatattttctggttctccgttctgtacttttggttttctgttctgttaattactattctcgttcatcattaataaagaagctgctctgttctccccaaaaccccttagtta

SEQ ID NO: 30050 - DNA, 484 bp, Arabidopsis thaliana columbia
tactgataggcacaagaatgtcccataataaaaccctattcgaaaggtactttttaaaaatgaagtaacaaaatctcagatgtctcgtcatcatcaagtcctacatgctatcaagcgtgaccctttgagaccttgcttttaatgaagtccccactcttgttacaacccaatataattcactctccattactactccattctttcatataaaatgtttataattaaaaaaaaaatcatgtagaatgagatttctacatgagagtaaattagaatgagatatcttcaagattcgtgacttggtgacaaggacaagttaagaacttgtagaagaactgatagagttctctttatttagagtgaacataatatcaaattaaaattctaacctttgaaatattaccattctttgtcactgtgttattcacctagttccaagattgatctgaatttgtagctcatgacacttggtttacaacaagtggat

SEQ ID NO: 30051 - DNA, 578 bp, Arabidopsis thaliana columbia
taaatatttttttaactctttattattttatattttatttgtattattcacgttaaccttatttattttttaaagttgtcatacataatatatgagaaatgattttttgaaaaatattttgctcataattaacttctttggaatgaaatgaaagttttattcaaaatccaattaaaatatcaattgtttttacatcatgtgcttcatctatttaaatttttgaaaagaattagaagaaaataatgtttatgtacttcgtgatgcaaactatacttgaaataatcctttatacttgcgtctaagaagaaaacatacttccggattagatatagataaatcaggctattagaggataaaagtaataaggtcggatcggttaggctgggttcaaagaaacttgttacctttgaggagatgtttagtgctattgagggctctattcaataattacaaagtttgttatcattttttgatataaaatcataaacgaaaggaagagagaagttcacgataacgacaaaaagaagtattattaatcatctaatcaaaactaatgaactcaattttttgacacatat

SEQ ID NO: 30052 - DNA, 194 bp, Arabidopsis thaliana columbia
tgttcctgaaattgattcaaaactcacaactaaactttatcaaatctaaggaagaggagtgagagaagtgacttcctgaacttcggcggtagtgtgatcgagtgaaagaggtggacttgagctcagagtggttacgatcgagtaaaagagggagagaaacaaacgtggagacgttgcgtctgatgaaaaagtgg

SEQ ID NO: 30053 - DNA, 236 bp, Arabidopsis thaliana columbia
actatgggtgatgaggacataaacaattttatatggttgatatacaatagtctaatttcttaaaattctgttgtgttgaagaattgattaaattgaaatgcatttggtccgatttaagtcattaaagggtaacaggaggacgtagagttgtttagcttgggttataaagctaagaaagtgtccaattcgaagagagggtttcgctaaaggacaagcacttcgtgaaaggcagtgat

SEQ ID NO: 30054 - DNA, 508 bp, Arabidopsis thaliana columbia
tatagactcaaataaatgcgtcaataaatgtcaagaagtggcaaaaatgtaggtaacttacaaattttaaatcactaacagaaatctcaaaaaaataaaaacaataaacaaacaaaatccgttctaaaactttcttcttcttctctctttcccttcgtatcttcttcttcttcttcaacctctcgatctcactgatttttctcttcaacaactcgatcttcccttcctatttttcaattggggtcttgcaaacgaatatctgctttgaaattgaacgaaattatttagttttggtggtttttcttcgacttcaccaatctgtctgaactcaaggagaatatatgagataacatcagtcttcatttctgtgagtttctataatggatcagctcgttaacttcatcattcgacctccaaggttaatccttctcgttccaaaattaggaatttgggttttttttgtggttccaaaattctcaatcgttatgtgtttgttagatcaatcgtt

SEQ ID NO: 30055 - DNA, 296 bp, Arabidopsis thaliana columbia
cgccagtgtgctgtaaagttattatctgcttgtggtggtgaatgcactgaccggctataaggaaaggccaaacaagaacacggttgcaaaaaccgtgcccttaaatattgaatctctattcagaacactttcttaaattgtcatttggcatattacgaacaattccgcgtaaaaacgttctgttacgccaaaccctttatccagcaggctttcaaggatgtaaaccataacactctgcgaactagtgttacattgcgtgtagatttgagtgggcaactttgtgtacacttttgtgt

SEQ ID NO: 30056 - DNA, 569 bp, Arabidopsis thaliana columbia
catcattagtaagaaatcaaccgacatttgttttgtgatgaatgtaataaaacacaagacgcatcaccattcacacaaagttttgtttcatgaattcaaaggtgaatttaaatgtagtatgtgatgcagacaagaagagaaaatactttgtgaatagcgagttccgtctttaaaccaatgttgtttgtacgtaatagtaaataaatagttaaacttttttacactagatatccattcgccttcatgttctctaaaaaaccacaactcagtaaatcattaactaaatcccaaacaacgttaaatagtaaaccaaattttaataaatcttcaaaattatatttttaattcctcattgcgctgcaactatgtgaacccacaaatgttacttatagaaaaaaataaaactacttgaacgcacaacaagtaataactaaaaaatatgcacacgtgcgatcgatcgtgtttatacatgtgataagaatacatatacctgtgaagaaatcacgttacgtacttaaatacgcgtatatagtgtacggaacggtcggggtaaaggtggtgcgaggcat

SEQ ID NO: 30057 - DNA, 590 bp, Arabidopsis thaliana columbia
cgccagtgtgctgtaccaacaaggttgaagtcgagtggtcttgatttgattgttcctccggcttgcgatagagtggtgtctttccttctcgtctcttccttatcttcaggttgtctggttgagtgcaggatgattagatgggttgagtgaaggatgagtagatgggttgagtggcgatcgagtggtggtaaatttggtggttcctccggcttgtgatcgagtggtttgtgttaccattacaatctctgctcgatcaggggattgagtgatgcctctaaaatggtcattggttgcgatcgagtggtctagtgaaggtgcgattgagcatgctgactctctgctctgtttctcttcatgtttgaacaccaacaacatccaaaacacctgaaaacaatcctagtatgcaatgtatatgcaactctaatgcaaaatcatcctaagtatgcataacacactaaaatgactacaaatgtgatgcggcgctaatgaaacaatgttaaagtagtgatgaatgaatgcttaaatcatgcaaattatagacatatcacatactaccattgaacagttacgtgccaatggaacatgagagt

SEQ ID NO: 30058 - DNA, 574 bp, Arabidopsis thaliana columbia
cattgttacacctcttatggaattcatacgtcaaaaacgtgccactgtgatgggaccccaggtacattatgctcacagttttacggggttttcacttattctacctagttgaatatcagaactttcctgggacggatgtctctctattttatttatttcaaaatggaacttctattgttgatctctggtttctgttcaagcaacagggtttatctgatattcgaagaggaggtagaagaaccagagtagtctctgcaaacaagccgagtccaaggccctcgaaacgtaactctgaaaagaaaaaggtttgtctctcactttttaggagtcaatagtcagtgtcgtctgccattatactcatctgttgccattatatttttcattctagtatgtggaaaaagaaagttcaaagaatgtgccccggaagactacagcagacgtcagcagctctaagccagattatcgtcagtcaaattcaagtggaaaggaactaccaggaaatgaacctggtaaaaaatcaacagctgttgttattcgtaactagctaattacatatttttaaaaggccacgttt

SEQ ID NO: 30059 - DNA, 587 bp, Arabidopsis thaliana columbia
tagtaacggacgatcccctaattttttgggttggttcggttcagatattctgatccaatttttttccccagccctagaacaaatcataagtgcataacgataatgagcagtaaggtacttagtagtttgcatatatggacgaaagatattatttgtatcaagtgtggtacaactatgggcccacgaatattcagtatccagttttgtacaagcccatgtgatccttgcaggccaattgacaattttaaatatatttatagcaacaatacaaatatatatttttcagtcaaatttgaaaattgcaaccgaaactagagagcagagtagagatcaacaactggatcaaaattttgaatttttataaaatctatagaattaagaatatataatatgttaaaactgaatttactccaaacctatattgtacaaagctgattagaattagtaatcattttagttccacatttctagcttttacgaggctattcggggcaactataactggccctatttggctcatcagtggcccattaaagatatatatgagttacattcataattttaaggaaaagaaatagttggtgtat

SEQ ID NO: 30060 - DNA, 528 bp, Arabidopsis thaliana columbia
ttctctaatcttcttttagacttgtagttaccattcaaaagtcatggacaaccttcgttaaccttgagggccactgagagacaaccttggacttggtcactggctcacttagcaatattcagttattcactctgttgtatataactcaccaattaaattcaaacaactaattcaaaacattatactatagcttttcattaaaaaaattccaaaacattcatttaattatataaaccaaagaacagcttttaagacttaaaatattgcctaagtatccaacaagtcaatacagattttttaagaaaactaaaccattttttcaactttacaacaaaaacaccaactgttacaaaaaaactctcgaatttcctatttctccagccttatgacaaagatatcagattaataaaatttagaattcattactttttcttcatttgtaaaattatctacatactagttatttctctccattttattcagtgagaagataaaattacaaatgcctgatcacaaaaagttataaaa

SEQ ID NO: 30061 - DNA, 1073 bp, Arabidopsis thaliana columbia
tttctttttttctttgttaaaggctgggtttagtttttagctcctttttaatctaacttttggatgttagttttgtaatttgattgcttttattattgggctagaaaaatcattgtaaaccccctactctttaaagcatatttgagctttgttgggctttttatatgattcaccaaaaatatatcatattttccaagaaacattgatttagtgtgattaatctcgaaacaaaatagttcattaagctttattgtgcaatgaataaaaataagaataagatttagatttttcactaaaatgaaaatagttatttgattgatcttatacaaattttttggaagagagttaccacaagaggcaacttccaaagatttatgttctcaatgtcatatacatccgtatatattagtctttttttttttttttgaataccaggaggttctgggccgaagcccgtaatcctcctaggcccgaaaccacagcatgtaatattagtttcgttccaagcgtcattcgaaccggcgacctctaaacttcgcctagggtctttaccaattgagctaacaacgcgtggtatattaatcttatcttgctaatgcacccaaaaatggacataagattgggtttgactactaaatcattttgttcaattagagtaaagttctttagtagcgttgatgaagagggaaataccataagaacatagaacccggtccagcccaaatgggtacgacaaaaaggcagcagccaaaagattccaggactacagattcatcatactttttaagacttttcttatgttttaaagcctattttgttataaaaaaaacatttagactataactccatttttcttaacatttaggacctttttacaaaaaaggttagtaagaaactaaacaatttttgtatgtacaaatttactttaaaatatgaaaaagatatagtaagtgtccaaaaaatttggtttgcctaaagctctaattattgttgggctggggctgcgtagaccacttttatgcagagatgtaaatcacaagacaacagtcaagaaaagtacgtgacccgtttga

SEQ ID NO: 30062 - DNA, 1273 bp, Arabidopsis thaliana columbia
  unsure (1)..(1273): unsure at all n locations
ttcttggttttgttgatcgaattatttatttattcataaaatagtatttctgacttgcggtttaattattatgttattggttggtttaattagatatttatgggaatatttaattatattttttttttttttaaatgggtcgggttgtttcaatattatccaaggattaagtttttagatatgataattcagtttttcgatgatatatgaagcatttttagatgtaactagatgatngatcactacgtgcgggtttatgtattactatttacaaattattttatataatctctgttcatataaagtaaagttgaatgcatctgttttaaaacataaatatgatttgtaattgtttttgaaaagtccaactatattagttcatctgaaaaacgaatgtgcttgagttgttttttattgttattctagattctcagtttttttttaatttatatattcctgtttttttggttatatgtttagattgtgagacggtgaaattttagaaaatatatttcttaaactaaaaatataacatgactttattaaccatgtctctgtatcttcaatctaatcatgtaggtgaattttaaaaaattattacaaatttgagttaaatagataacaaaatgtgaagttggaaagattggcgagtaagattccgaaaaagaagacgaaggggatgaattggaatttggaaggagacgaaagaggtaaaactgaaatgtcattaattgattcattatataaaagtttgagcaaattacgtttaattacttttaatgatttttttgtaaatatatgaaaatatgtgctgatgtgtcaactgctggattgctgaggtgtcatgttgtgggagagagttagacttctttcatatatatgatttatttggtatttatgttagtctctgggcgagcgagatgaaacatgtgtctaggcctctagggtctttttttcttactacaaaaaggtccccaacatttacatttctttagaaataggccccaaaattcatatgtttttgaaaattagattttaagtttttaattaatcttgcctaatttctaaagtcccttcaattacgtaggattcatataatcgtgcttagtttacctggaagcctgaactagttttgtcttctctcagatgcagctggattaagagagagagaacaagaatcttgagtagttgactttatattggaactggtcttttaactctctgggcagatcttttagaaggacaaatgcgagaccagaacgatatatgagtt

SEQ ID NO: 30063 - DNA, 455 bp, Arabidopsis thaliana columbia
ccggagaatccgacttcttaaaacaggataaaaaggatccgcgtgtttttagggtgaaactacaaatttgaacagttaataacaattcaattcaatggccaggattagacgtaagaacccgactttttaaaaccggatagaaaggatccaagtgttttgaaacggatttttcatgaaataaaatttttaacccaatgacaaatttgttatttcttccaacttcatgcgtatctcattaaacgtacttcttaaataataatatagatgcacttaaataaacaaaaatcttttaaaattcaaataattatatttatactcaaaaattcttattaataaacgttctaaactaaaattggtctagtagttaaccgttaagatttaaatatctaaattacaaaggagacatgaaaaatcaattttttatcctcacatgttctaaagtaaagactaagagt

SEQ ID NO: 30064 - DNA, 293 bp, Arabidopsis thaliana columbia
  unsure (1)..(293): unsure at all n locations
cttcaaaagaaaaaaaaaaaaaactaaaaaaaaaaaagcataaaaaaaaatcttgaaccaagaatacacgtttacatgtaacaaaaatattgtaatctctcatctagaaaaaactcttcttcactctttctctctcgcatgcctaatgtcatcttacgaagtctctcacattgctttagaacctggttccggcgcgcgtcgctgccgtccaagtgacgtcagcggagccgntcgttcttcttgtgattccgactccgattttcactcagctgttcgtagctttcgcggcgcgt

SEQ ID NO: 30065 - DNA, 200 bp, Arabidopsis thaliana columbia
ctaaaacaagaagcttgaagagaaggagaaacacctaggaagacaacttcttctcaactaaacaaccaaaacactacctaatgcgcactataaaaacaaagccatcacttttactccatcttgaaaactttcactatttgaagatgattcagttctagtacataaatacatcccctgaacgaccccgagcccagtataaa

SEQ ID NO: 30066 - DNA, 964 bp, Arabidopsis thaliana columbia
gtgatcgatttatttctggaagtcagcttccacgtgtcctatttatgtaacgcacgagctgtggtcccttccccgttgtttccctcccgtccactgttcaatgaattcggatctttccttcttcttttttttcgtattttctttaatttaaatttgtatcttaaaaacaaaaacaaaaagcgttgtaagaattaagaatcagtataaaaactggatatactaacgattttgcattgttttttatgacgacatattgcacattttcatattgtaacgcattaatacaactcacaaaagctttacaccaaatttgatgttatttcttggagttgtcaaaacgtaattcgaaactgatctcattttcctaacataattttttaacctagtatagcatctaaagagttttaaaacggtcatattggattttagaaaatgacgaacaaattattccaaaaattacatgtttatttgattttcccaaattcattgatgtgaattaaaaaaatgtatccacataattagggaagctagctaaaacattttttagtaatattaaaaaggatggaaataagataacaaacagcaatttggctattgtggtcggagcacgtgcggttccagttaggcgtgacaaagccaggaagcagaatcacccagctggactcatgccattattatttttttagccaactaattaatatagtactttaacaaatcctatttacatatttgttaaattttcacaaccttaaattaataaaagtaatttcataaaatgtcatttgttattattgcagacaatcaaatgaaacaaaaaaaagttcctaataattgtgtttattattttattttattaaaccacgtcttctcatttatagtcacaaatccaaaaactactaaagtttaaaatgaagaataaaatcggtgacgccaaaaaaaatccaatctgtcagagtgactttgg

SEQ ID NO: 30067 - DNA, 523 bp, Arabidopsis thaliana columbia
gatatttcttgtaaaattaatgaagataagatagtataatgaatttgttctcgtcattttccttttctttttagagtagacataggcttgtcttagatgtgcgttgtcattttattttcagacaatctgacaaatagcaaccaaacaagatgaattgtgatgggattctgaaaataacaccgtgtagtttgtccttaatgttagtataaaatagattttttagtggttcaatcatagaatttcttgggaccctcaacgcataattttcatattttaatcagattctcattagtggcaacatgtcatggggcgattccagaaagtgctagatttttttgggaaattggaattttgatatgtaatgcagttcagatatgattgaggacaaacaaatcatattgctgaaatcatttacaacaatttattaatcaaactaactagtagatctcaactattattatctaatcattcttctctgtgattgctaatcattgaaagagctttgttgaagtgagttgctttt

SEQ ID NO: 30068 - DNA, 550 bp, Arabidopsis thaliana columbia
  unsure (1)..(550): unsure at all n locations
cccaaagtattattatatccatcagtcacttattttgaaaccaaataagaggagctggagacaaattaccagcattaaccaagaacttaacggaaggtccaccaggggacttcaccatccacatgtaaagatctttgtgcttcctacactgaagacgaacacaaacaaacacgtactaacttcagtttctgggaagaaatcaagaatacattgactttgcagtttaatactctacagacatgctgaaatcaagtaaatccagacatgctgacatttaaaacagagagactagagagcccaatttgaaccagacaaaagagaattcaatctgtaatgctctttgtttctatcatcaatggtacgaaagttttaccaagttacatttcataccaaataggtaaatacatggaaaaagaaattaagaagattgatacgaatatgattaccaaaccccttacgaagagcagaccatagaacagtaactggttctggaattaaggtagccaaaaaaaagattgaaactttacctcgaannaacaacaggaagaag

SEQ ID NO: 30069 - DNA, 1050 bp, Arabidopsis thaliana columbia
tgatgcccagaaaagtagtaacatcaatgttatgtttgcctctgttaaacaaattaggctctcaaattcaatcattggtgactcatggagctcgatcagaagctaggctttggctttgtagtgctctttccactatttctatatctcctagcaagcaacttaatatcttcatgaagttattgagatcaaaacctagaaagatgcagtttttatctcaggttttgacaatgatgtttgagaagagaccaaggaaacttggatttttgttagctaaaagaagttatatacttgagaagttctttgaaggtaaaagagtctttggtttcacattgtgtatttacattatcttaagattgtgcttgatgttgagtttttgatatttgtagggaatcagaagcgtatactagagtggttttctgagtttgcttatgatggtgggtctgatcacaagagaggtgcaaaagcattggcgcagtttgcgtttgcgaatcgggatatttgttgggaagagcttgagtggcgaggtaaacatgggcaatcgcctgcggttgtagctacaaagcctcattatcttcttgatttagacgttgaaagaactattcagaattttcttgacaatgtccctgagttctggtcttccaatgagtttgctgagtcgcttaaagatggacagattttgtttcttgataccaaattctttatagatctctttattcgtttcatgtatgaagaagatatgtatgatgtgtgggatgctgttgaggagtttcttagggaggagtctttctcttcgttaacacagcatctccttatcactcttgaagaacgtgacttgtgtcgatttcttgaattgcttggtaactattttgagccaggtattgaatcttgggatagtggtgactcgtctcgctggcttggggtcttctttcaagatatgttgacacagaatctatcgacgagctgctgctgctgagttctattatcaatcaaggtcgtcagttgctgcggcttgtacgtgatgaaacgggaatgatgagggagactgttgaa

SEQ ID NO: 30070 - DNA, 486 bp, Arabidopsis thaliana columbia
tagagcatttggaacccaacagtgttatgtaagtaatatattgcactcagggtttctttcaatctgcttcatgattgtggtctcttcctttttgtatataacatttgatttccctctattattaataatattaagactttctaacactgcagaaatgaaggcctaagttcatctgcaacatcaggaacgtttttggttgaggatggtccatattactattgcatgcttgaaatcctacttggaaggctatctggatctctatataaccaggttggtttgtcgctgttactttagaaactccttatactttttgttggaagagaagtatgattgcttgtatgttttaatctctcacaggccttgaaaaagatatcaaagtttgttcagacaaatatccttcctggtgcaattgccgaggttgggttgctttgttgtgcatgtgttcattcaacccccgaagaagcagttgctcaaattgttgaacca

SEQ ID NO: 30071 - DNA, 532 bp, Arabidopsis thaliana columbia
tatctgtttccattaagatgaaagttctcatctatatttgtttatgtatagtcagacaactgccacccaccagttgaaaactgctatgatgtccgtagcatttgctggccggtcaatcctgcagtcttccatgtcaactgctaaatcacaagatcttggtggtgatgtggacgataggatgtttcttgatcttattgggatttctctatcaaatgcattgcttggtatggatgccaatgacccccctaaaaccttggccactatgcaactaattggctccatattttccaatgtaagctcttttaccttgaaagtttttaaacattcactgttcaaaagacttctttctttatcggtgggttttgtccttgcatgttgcagatggctgttttggacgatagttctgatgacttatcattcatgacaatggcttccttctcggagtggctggatgaatttttgtgtcgtttgattgctttgttacagcatttggaaccaacagtgttatgtaagtaatatattgcactcaggg

SEQ ID NO: 30072 - DNA, 538 bp, Arabidopsis thaliana columbia
gcaagtccatgaatgtactgatttaagaaggaaccagaaacaatgacaatgcaaataggatttatataatgaactaactttaaagctcccacttttaagcaaactactgaaacaaaaaaaaaccagcataactaattgatctgtcacaacttagcttgatcatatcaccattcaccaataaagcaagactataatctaaacacaaagaaggaagcttaagaacctgaaatacaagtccagcaagaacaagcttccatttttcagcaagaagagaagcttctaatgtcgcttctgagtaaattcgtctccatagcttcacatacacacacaaaaccatggacgcataactatcaaactaaacaatttcaacatttatcttttgaaaagagagagactctgattaacgcaggaaaaacagaagaacaaaaaccttaggagcttcgcgatcaacgtaaaccggcatggttaagattgagaatgaacattaatctctgcagcaagatcaaatgcaactgcttttgtaagaaagacagaacag

SEQ ID NO: 30073 - DNA, 504 bp, Arabidopsis thaliana columbia
atattcagagattcacttatattatcaagggtggattacttcaatctctacatcttatttcatgattacgatggttttcttatgaatctatcaatcatttgagattagtagattgatttgttctgtaatccattattatcattatcagtgagaaaaaaagaagaattcgtaatcggttgtagttccggcaacgtattctgattcactggatttggaatctctgcatgcggtgaaggatgtgaaataaacacgtatcctcaacttatccccatcgatgagacacgttcttgagtttatcctttcttgggcctcttgtttgggcttcgttgaaagttgtctttgatgtttatgtaattgggtgtgatgttatgtattattatttcaataaaactgcagtttcagaggaaaaaaaaaaaaaaaaacaagtatgaaagactttcaacgtacaatatgaattttatgaatttcgaatacattgaggaagcactacaaatattacatgga

SEQ ID NO: 30074 - DNA, 122 bp, Arabidopsis thaliana columbia
ccgggacctcgacgtcctcgacaaggccggcgtcatccggcgggtgcacgggggagcggtacccgccgcaccctgcacctcgtcgagcagtgcgtcgtccagcgggactccacccagaccca

SEQ ID NO: 30075 - DNA, 624 bp, Arabidopsis thaliana columbia
tttcgtttttcatcaagttttggtaaatgatgtttttagtgtatacaaattttagcatctgaaacataaatttaaaattctaaaaacttgaaatattaaaacagaactacaacatagttgtaatagaaagttggtcgaagttccaaactctatgatctggaccgttcgttttgtcctcacgcgctcgatctaccggactgctcaaagggaatcaataaaattccgaattagtctcggcagtgtagtccacgcggcgcgcaacattgcgatcaacttcataactttttagcttctcctcctccgcactgggctcgattgggtgagacgcggaccactgcacaggcatgcaccgtcttcctctctctcgctctatttgtcgcaatctctggaatttgtgtgatttttcggaattgcttttttaagtgtcactcgtggttggtttcactcttagttcgaggagtgtctatctttggggctttattgatccatcttctccttgccgtttatgggataaaatcacatcaatgaggttaatgctatccatttaaagtcgacttttgtgtatttggggcactgacataactctctggtactacagcagggcttcatgtgagatttgcgtgt

SEQ ID NO: 30076 - DNA, 561 bp, Arabidopsis thaliana columbia
tgtgaagctatataacttgttcctttatgctctatttgttcaaaattaggatactagactctctggtttctcgtctgacgaagaaactgcaccgcctcggatattgatggcattgccggaaagacccgagcttcatgttcctgtaaattaagaatcaacattcaatatctcttctccttatatatgttgtttgatttgtatatcatatacacacataactaacccacataataaacgttggtattccaatttaaaaggcaaaagggataaaagagtcctaaaattcacatcttagaaatggagatccttgaacaataacaaccgaggattgtggtcgattcacatgcttccaccagtctcgtaactcttgcactttgttgcataggcctttccattgatacggacaacttggtgcaatcatgacggctacgaaacctagcaaacaagggagaccgaagtatagagccaagtgaggagaaacagaatagaggaggtggacgaaaatacaaaagccgaacgtgtgacagatgcgtccacgaagtaagctttagatgctaagac

SEQ ID NO: 30077 - DNA, 1263 bp, Arabidopsis thaliana columbia
gatcagagcttcgccgccaaaatctgttggatcatcttccatccccgtagctttgctttcgtctctgtttattgcgaactcgtttttctccttcttcagctcaatcggatctcgcgatcgggtcgggtcaatgatccagttacagatcgtggcagtggcagtactattcctatattacgccattctaacatatctggtcaactccaaaaacgctgtctttgttgcacttccgtcttcgattacaactttattgcttctctttggcttcattgaggagttcttaatgttctacctgcaaaagaaagatgtttctggaatcgagaatcgttattacgatctcatgctcgtgcccattgccatctgcgtcttctccacggtttttgagctcaaatccgactctagcacgcatcggtttgcgaaattaggtcgtgggatcggtctgattctgcaaggaacatggtttctgcaaatgggtgtatcgttttttaccggtttgatcactaataactgtacgtttcacgagaagagcagaggcaatttcacgatcaagtgcaaaggacacggtgattatcaccgagcaaaagctatagctactcttcaatttaactgtcatttggctctaatggtagttgtggctactggtttgttctctgtcattgctaacaagaatggttatctccgtcaagatcattctaaatatcgaactctcggagctgagttggagaatttaagtactttcacacttgactctgatgaagaagacgaggttcgagaagagagcaacgtagctaaagaagttggtctcaatggaaacagctcacatgattaaaggtataaatcaaagtttcagacttttttttttttgtctgttttgaatctgtccattttagaaatgttgttggtcaatgggaggattaatgatgatatgtaatcaaacacacgagataataataatgttgaatcttttgcatttgatattataagatactgtttcttatgaataaaaatcttacagttgtctatctcttttggtttgctagttagttctaaagctactactacagttagatcattcgtggaatcttatggcaaacggttatctaagtcgactgtgtcaaaggaatcaaagtttttcttctttcatttaggggcttcttctttttcatcgccttgatcactgctactcttgaaaaacttgcatagaaatatgtagactacaaagcttattgtacttgtaagagcaagaagccagtagtatttgtc

SEQ ID NO: 30078 - DNA, 1005 bp, Arabidopsis thaliana columbia
gctatgtaggaataccctatcttgtttataagagatttgatacatgcaaagtattcgaaaacaatgtccgaacatataattttcgccccgtaataaagcaaagatcacggaaaggcccaaaaaagtacattaaggtcaaaatccggagtagaaaaacaaaagcaatagttgaattccattttccttcctcattcatcggagagctctctttgggctttccgaaaaggtatcacatgccaagtgtttgacctcacggtctaaaagttctagagtcatacatttttgacaaaaaaaaaaaattgaaaaaccgaaaaaaagaggtatgcaacacgaggactttcctgtaggtcacccatcctagtactactctcgcccaagcacgcttaactgcggagtgtgatgggatccggtgcattagtgctggtatgatcgcatctgttactacatgcaatgcaatcgtatctattcttttttgaagactttatgatccatttgccttgggtcccaccatctatgtaggaataccctttcttgtttagaagagctttgatacatgctaaatattcgaaaacaatgtccgaacatataatttttgccccgtaatatagcaaagatcacgaaaaattccgaaaaagtacattaaggtcaaaagttggagtagaaaaaaacacaatagaagaattccattttccttcctcattcatcggagagctctttttgggctttccgaaaaggtatcacatgccaagtttggcctcacggtctaaaagttctagagtcatacatttttgacaaaaaaaaagagtaaaaccaaaaaaaaagagggatgcaacacgaggactttcctggaggtcatccatcctagtattactctcgcccaagcacgcttaactgcggagttttgatgggatctggtgcatctagtgctggtatgatcgcatccgttactacatgcaatgcaatcgtatatattcttttttgaagactttatgttcgatttgccgt

SEQ ID NO: 30079 - DNA, 572 bp, Arabidopsis thaliana columbia
  unsure (1)..(572): unsure at all n locations
ccttcaatttcacaagatatgtaattgcgcatagatagaaagtatatatacattatgtggtatgtgaaatgcaacagtgtagagccgaagcagagaagccactatacaatggaggaatgctgaaggaccaaaagccttacgtcccaggcaaagactctctcacaggcattggtgctcattacacaccaacttacatattgcacaatctcacacagaacaccatctattgcttctccagttaagcatttcatgctttcatctctagaatgttatatattcgttaacagatgaaatgaatgtgatgatctgactgatggacacagtatgggtgaagatagaggctggtgctgcatcagctcatgtaagagcaaggctgagagcagacaacgccacattaaactgcgtcggttctgtaactgccaaacatggttgctggtctttcctcgaaggaggatccttcttgatctcgttgtaacaatccacctcttctttgaggtagatctatatatctcaaaagtactcattagctagatgatccanagagtgtaaatttctgataatgcagacacaga

SEQ ID NO: 30080 - DNA, 476 bp, Arabidopsis thaliana columbia
caaaactgcctgggaacaaaattaatctcactccatgcattacacagagaatagtcactgaacattaaactatttaaccataacagagagattatctttcagatcagtctactcaaccatcacatttatcttagcacacagtctatgtactttcatcaaactccaaccctaaagtcatcaaaagggaaagcttttgatgagagtaccttagtgcacaagcaaacgaagttaacgaaactgtctgccatccccatggaacttcccatctctgaagtatcggccactctgagctacctccttgtaactacaacaaatataacaatcaaaacttcaaataatttctcaaaggtctagtcttttttcacattccaatagaatttggattcaattgaacaagttacatagagctgcctcagaaaaattcagaccggaaactatacaagaatctaatttagatagagtcagtgagacagtaa

SEQ ID NO: 30081 - DNA, 628 bp, Arabidopsis thaliana columbia
tgaatgttggaagataaatcagtgcttagaggaaaagggttggtttaaagaggatggaaacaagagggagaagaaggtagaacgcgaagaaaagagcgaaagtattgacgcagatgtaaaataggtattttgtcatttagaatttgtagacggaatatctttgcatcctgagtttagtgatagtttgcgattgaatacatgacttggtttaaggaaaagagatttttttactgactcgaactgccagaggaagagaagggtgttctgtcttttacatcatttgctggtgaaacatttttttaaatgaaaatataatatcctcagttctagttaagcttgattcctttagctctggtagagtggtgttttggaagagaaatggtgttttgtctttacatcaattgaggtttgctgaaatattcttcttgatggatataacattgttgagctttatcttgagtggagtcttttacaaaacatttttatgaagtttacataaacaactaagaaaagaacataagaaaggggttcagagaaccaagaaaccaaatgttctcaactctgtaaaatggatgatttagattccttgatttacaattctaagtgaagattaattaggaatattagc

SEQ ID NO: 30082 - DNA, 516 bp, Arabidopsis thaliana columbia
ggaaggatccagtagattttgaatttagattttccctcttaagcctctcctcttttggtggggttatgattttatcaattatcattacttttttgatgtcttttatggtttatttatgattagatttgttcttcttgaagctttagatctattgatgttctgtttgttcacctcttgatgatttggagttaaagatcttgtgtgatttgtaacaatgagtagaagatttgaccaatattactgtattgctttgtttcagggatctaccggcaacaaagtccggtggatagtgttataataagacaatggcgtctaataatcatttcatgaacagtagatccaatctatcaacaatctctgaagctgctgaagctgagaggcaccagcagcctgtgtcaagttctgtgacatttgcccgcaggactccctctggccgatatgtcgactactccagagatgatctcgatagcgaacttggaagtgttgatttaactggctattcggttccgattcctc

SEQ ID NO: 30083 - DNA, 546 bp, Arabidopsis thaliana columbia
tcataccccgaaacagtaggagctaccacaaacagcaatttaatttgttgtccgtattttttctggtgacacggacatctccataagtgataatttaagtcgtcctcaataaatttagttttgtttacacataacatccaaacttttgttttataaccttaaattgaaagtaaaaatattttgaacagtaattgtattccaaagttttttttgtttttttttttgcttataaccaggagtttcagggccgatgtccttattccccctcaggatccgggtaagaccaggtgaaagcccctggttaagtggaaatgactagcaatttcgcgtttgcggggaatcgatacctggtttggaccaacagggcaaccaacagggcaacgcttcctcaaatgaaaccactagagcatgaccacttggtttcttttcacaattgataataaataatcaataatagactgattggtaccatttaaataggaattttatttgtcataatactcaatctatttacttttggaattttcatccccaactttttggtta

SEQ ID NO: 30084 - DNA, 637 bp, Arabidopsis thaliana columbia
  unsure (1)..(637): unsure at all n locations
atggtatgtatgtatgagagcagctattgtgaggcctatatatgggcttagctcattgtccatttgtttccaaattattcatatgatcaacgatagatgatcaaatgaagatatatttctaatacatttagttttatcattgtcaaaatatatatttctacaaagaaactttacaacatgatcggattacgtgaaactaaaaagagggaagaaacttgatagagacaaagaggagccttttgttataatcatattagttatcccaggctgagaaagtgatgattcctccatgcatttaaaaaattgtaggtacataaagaaaagaaaaaataaataaaggtggtagatagtggagcaacggccaagagtaagataacattctatatctctaaagttgcaagttgggttatatttaactaaaagtggaaatactaaaaggggaaagcaatcataaaagcataaccaaatagtcaaactgacgagtgtgttggacgattctgttcttctcccctctgaatcccacaggggatcnaattgtcatttagtcttgatatatagagcacaacagtgacattagtttgttgttgctactgtaaggagtgggtttgaaagagcatggagggtgtattaggtgatg

SEQ ID NO: 30085 - DNA, 596 bp, Arabidopsis thaliana columbia
ctctagaggattgctctcaataagaacaaaatttcccaggaaattgctttcactataatgtttttgtccttgtttaatatcaatatcagcaatgatacaaaatttgaaaccatattatcatttgcaatctaataaatatcgtttctaaaagattatgtagatcttcatgatactctgttcttaacatccataatttttattttttgataaagaacggccataaaatttggtggttgattggtaatcatgaaacgtcttctttttttacatatgagaaagaggagggacgagaaagcaggaggaccaagaatgggaccttccattccaaagagacacaattataattcttggggtcagaatttgaaagaacaaaacaacaaacttctactggagaaggtaagatagaaacatgatccgcggtggtgctttgacacatgttgctttaggcttaaccgtcttcctcctccttgccgtcgttcacagccaggttgatacatatcacttactgttctttgttcatgtttgtgcgttgtggtttattcacatgatggttattgctagttctttatgatgggttggacaaaatgtcaggaaag

SEQ ID NO: 30086 - DNA, 487 bp, Arabidopsis thaliana columbia
agaaatataattaacatcaacacatcataatcacaagagaattaaaccacaaaaacccaaatactgaatcctagttttccacaatttcatcaaaattcaaataaaacccagaaatttcccagaaaccagtcgttttgagaattgaagacgaagcattgtgatttacagagaagaaacagtaagagaagtaaacctaacgactctacgagtaccggaaatttgtggaagagattgtgaggggattttcgtgtgatttcaaaaaggagattgaagatgaaaatcgaagaagagaacctgcgattcgaaggagattgaagctggagttgatacagtcgcttcgctggctgaagattttacacagtcgaagtcggttaagggaagaggtttaagagacggcgaaagggttttaaacagtatctttgcgtttattacttttttttttgtcacctttgcgtttattacttattggtatttaatcactttagta

SEQ ID NO: 30087 - DNA, 473 bp, Arabidopsis thaliana columbia
tcatttcttcttgctgtaaaaataatcgcacggaatatttaaataaattaataaaagattctgtatctcactgtaaaaactaaaaaggtaaaaaattgaacaattaactttttctttccattcactgcagtctgcaattaatagcctctctctctctcctccttcatcatctccccatagccgtcgagacagatagagagagctgaaatttctgtgagaagattttcttccgacattttctctttccaaacactgttctacacgtagtcggaaatctcggaaaaaccaatctccgagtcagagagagagagagaggcgttcactgttgtaaaggattaagctttgggtaagaagaagatgaagaacaagaccaatttaggtctctcagtcttcttcttctttatatgtctcgtttccgtgacatcagatctagaagctgatcgacgagctctaatcgcacttcggtgacggtg

SEQ ID NO: 30088 - DNA, 649 bp, Arabidopsis thaliana columbia
  unsure (1)..(649): unsure at all n locations
acacccaaaaaaaaaacttaatacagtgttgttgtgtcataatatatatagggcaccttaccatgtaaaatcgttttccgtcattcaaaacatcatctgagggccaatcaggcaattcaccttggaagataccaccggcccgtgcatacaaagcatcatcaaagacatgctcaggcaattcacctctgaggacagcaccggccagttcattcaaagcagtatctgagagacaatcaggcaattcaactttgaagataccatcgcccagtgcgccaccatgaaagtgaggcatgaagggcgtctcggtggacactatgcaacattcattattaatcagcaagctaagggagatttttatagtcaggctagaattttataaagaaaataagtcaccttcaagtaagtcaccttcgtgtttaggtctagcaatggagcagtttatatccaaactgccaaattgttgttcatcaactcgaacctgaaaggttttctgcgatgagccagcagctggatcgggatcatgtgcaagcagagtcatgtagaaagaggaaatatagttcggtaacatgttgaatttcattagggtagcgagctggaaagcttgtccctaaggaagaaaatcgaatcaatcnatatatatggtatatat

SEQ ID NO: 30089 - DNA, 504 bp, Arabidopsis thaliana columbia
tcccgtttcgatcaaatgttttttttttttaatacgattttaaaggatcggttatccctaaaaaaaagtaagatttaaggttacataagaactaagcatgtcttaatcatatcactcaagtaaagatcaaagatgattttactaactacccaattaccactatatcaacttggattctcacgcctggccataataccatcacattcacatcactaagtgcaatacttgattttaaaaatactcaatttttgtgatatttgaacaaagtttcaagtgattaaattaaaacataatcgtacagttattctcttcaaagatgaaaacattaggaagaaagaaatacaaaacaaacgccacaaaattggagtgactatctccagcgttacacagtataataataatactcaacataaggagccttgcatagcaagcaacaagtcttgcttcttactctgatgctttagacttcttctttttcttctgcatttgtgggctctgatgttg

SEQ ID NO: 30090 - DNA, 609 bp, Arabidopsis thaliana columbia
caaaacaagacaaatgatattgataggacccttactatattgctagttatttttgttgcttctgcttcaatgcttattggttattattagtatggagttcaaatctttgtcttttcttctgttcaactaatatgtgtttaaatccgtatgaaaataatttaacgattggaaactatcgaatttcattgtgcttgtatgtgtattctataatccaatgactaatattatactacgagattcgattccaatgacggtgtaagttaagtattgtgatagtggtaagctactcgcatatgttaccaaaaaagaagaagataaagttactcgcatataatttgaatgtgtgattagcaaaatactggtctagatagtcctagcgtagtatgaaatagtataattttacatgttacatatatgagttaataggggtatatcaaaaagtaatatatgagttaatagttttttttttttttaaataccaactttgtaggttaagaattccataaaaaaaattgaccaaagcgagaagaaatggtgaagtggtaaaaattcaaaaaaaccagtaaaaatggtgaagtgggtgcacgaacagtatgaagagaaggggag

SEQ ID NO: 30091 - DNA, 577 bp, Arabidopsis thaliana columbia
ccccaacctatcttcattttcatctccaaaatagagtttggagttagatttgctccgaccatttccattttcaattacaaagtggaaatcactcttttttttctccatatttggagacaatttcattttagagatctccatttttaactctagagtaagattggagcaaaatcctattttggaagagaaactagagatataggttggagatggtctgaagagtgatcaaacaagaattgtataatggagaattttgccaatcacaattcaaaaggtggttgcctttaggattttatattccaaagactgtctcaaacattaaataagctaataagagatatcactttccatttcacttttctctttttttgtctttttttagttgaagtatattatttttgcaatattcaatttgttaaaaaagataaaggtttcaaaagagatatatcacaatagatttgccactctataatatctcacgttccattgtggatttaatatatacattatatggaatttattttagttcaaagttagtaaaaattacttttaaagaaattacattggggaacgaaag

SEQ ID NO: 30092 - DNA, 339 bp, Arabidopsis thaliana columbia
cccgtccaatatactggttggaattttttagaaaattgttagtatagtatttatcgatgacaaatcatctttcatttttctattgaagtttcttaaggtcgagcatccaacacgggatttgcatatccatcaacacatgtcagccagttacatatactggacgtgaagaatcgatcggtgtttcttggatgcgtaactattttgagtttattcaatacaaatccaaacaacctaaaggaattagttcacattgttactggattatgcagaaaaactagacataatatttctcactcaataaagttttacaattggttaatggtggtggggggggggact

SEQ ID NO: 30093 - DNA, 355 bp, Arabidopsis thaliana columbia
gtgcgtgttcagacagttacaactattgctttagtggtctattgaaagtttgaaaccagtggtttgctaattagattctcacgtgactttgatcattcattgtaaatttttgtaataaattaacaaaaacatgaacgcgtatcgtgtcatacagaacttatatcatacatactcgtttaaatacggaatagtataattattatatcagctatctactttactcgggtcaactgaatttttgtatcatagggatatacagaaaatacaattaagttaaaacgtaataattagtatcagataatcgaaactcttcaataatgagtagttactagttatatacagagaagatactagc

SEQ ID NO: 30094 - DNA, 619 bp, Arabidopsis thaliana columbia
cggccttttgtaacccaaaaaagataggtgtaactcagttcggtttgatttaataaaatttcgagttggttttcattttggcttgatttggttacattaacaccggttatgattagtatcgtcgtatcgatttcaattttagttcggtttatatttttccacattggtttttcgccctctccggttataatgtcgaattaagtcagattcgaaccggttcttccccatgatcgattcgattcgatggagtgaggagagagaaggactataagtttccatgagaaagaagaagtaatcacacacttgttcttcgattcgtttctgggaactgagaatatttaagaacacgatggctatggccgctttaaatcagctttttgttgtcctagcctcaaaacccgagcaggtagatactcttttatcttttcaattaaaccctagacaattccagaaaaatcaactctttttctacaatcaagtttacccaatctatgtatgatacaggttcaaacttcagcaagattgtttctttgttcaattagtttcctctgaattgatattgttcgaataagttgagaatgtgtgtaattgttgtatgaattaaggtgtgcaaatttgg

SEQ ID NO: 30095 - DNA, 631 bp, Arabidopsis thaliana
cgcaccaacttgactgcttgcacgtgattgagcacgggcaggactatatgacccaccaaattgagcggcggaggagggagtagtactagactttgaagatttcgcggcggaagagagattgctagatttagacttagaggcggagggaacgggctgaacggaatctggttttcttgtaaccgggggagtatgtccggcatgacctgtgaccgatccagaagagctagaactgaaactactggtggaagaagagagtccactcggctgagtctgaagcggtgtaattggtgatccaagatcgacattaatagtatctggtttatcattgttattatcttccatattcaacgagtcacagagcttatcggcgacacagttagattctagtataggtttcttgagcttcgacattgttgtatcttagcaagattacaaaaaagaataagatacctgatgatgaccgttaatggcgaatacaaggtagagacgaaactgtaggatcataaatattctgatcaatgcatggaaaatgagagagaatagaaagattggatcttgcgatgtcgaagattgaattcagaaaagaaagaaaaaaagagagagagaaaagtttcagagaagattagagaga

SEQ ID NO: 30096 - DNA, 1317 bp, Arabidopsis thaliana columbia
aattcttcctccttcgtatactataagggtacgaaccactaaaagtgagtggccattcaggatcagcaaagagtggtaagaagggaaaagaagtcctgaatgtatatgctcgtttccccgatctaacacccattcatgagaaagaattaagttcaagttaatcgtccaatataggggagagttgacgtcggatccaacagaaatttctgcaaggttaagcttctgggggacggtccgggcgtagtgttcaaggttgcccgttccttgcgaccctgtaagtgttcctcaagaaacaattctcaacacataatggtcaataatcatcatataacaaggtctcagttccctactagttttgactcaataaaacattactcgataataaagaaaaactttttgctttgttagaacatatcggtgtaaaaagtggaaaaatgtttcaagtcaacaaaatagagagtagcattagtagtaatggattcattaatcccccagacttacttcacaccgtccctcgtgtgagaataagcatagggattaatccgtgagaaagacaagttaagaacaaagtcaccttgtttgtggtgactaaccggatgatctctctccttgcttaacagcggccttacacgatttagtatggttgaattccatgatattaatctccattcccatcttccttgaaacaaaaacctaaaaccaccaatagctttaacaaaataaaataaataaaaacatacctaagatagattgatcttgttgttgtcaatacggccacgaataagatcaaattcgtggtgacggatggtgtgaatggatggtaaggcagttgcgggcttggcgaaagagtggagtgggtgggtaattaacggccggttgttggatggggtcgccggtcgttgggattggcggaatagtcgcaggttaaatgaatcccttggcggaccgatcgcagtggcggtgcaacttcccttattcattcacgtgttggccgtagttgaccgagtcttggccggttgagttcgcattcggccggaccggcgggcaaggtgttgccagggccgctaggtagggcaagtccggcgaacgcgtggcacagtccggcgggctccggctagtggtcggggcgcattggaaagctccggcccggaagactccagtcaatggctggcactgcaggcggactccggccaagtgatggtgcaaataggcggggctccggccaaggtttggcggggcgggccttcttttctaggcggcgcgtttactcgggcgagtagtcggaccagttgtccggcgcctagtgacgggtcaggt

SEQ ID NO: 30097 - DNA, 247 bp, Arabidopsis thaliana columbia
tgcagacaattaaatacaaacacttatgctttgctttttcatctctctaacttcccatatctcaatcccctttaaaccaactcccgagacctaataaacctaaaccgtagcaccaaatcaaaccgctactataccgttcacagacgttttcagtttagagtttgacaacttcgggcataaagacacggtaacagacgattcaatcggaccatggtcgaccattaggtgtcagaatcgtacggataca

SEQ ID NO: 30098 - DNA, 870 bp, Arabidopsis thaliana columbia
aggatgattctgcgacaatggaacatttgtttgcgggcgacccgtaaaaaattagacaaacaaaaaaaaaacctttgcatctccttcgttcaatccgttctgcttcaatttttctcgaatcctgaagtaaaatttcctttgttgcttctattcttctcgaattctcctttgttcttttagtttttgtagtttgttcaatcgaagttggaaaaaaactaagattttactatgaatcagtgatcgctcctaagcgagctgttgaggctgtaaaattcagaaggaataagcagagagattgagaattttgggtttgttatagttaacccaacagatgaatggaaatatgtctcatgtcaaagactcagaactcaaaacacctttctcttaattcatgttgacgataaagcttgatattgatgaagagacatcttgagtttgagattcatgttttcagtttatgactttaatttaatgtttcagttaagtactttagttaatgcttctgcttagttactttttatacttcttggatcgaagatcacttagtttgtgttggaaaattgttatttccacagaagagagtaagaaaacagagctcacaatcttttgattgtgatttgtgaacagagaacgtttttctattttgtgatcttggttcaaaacaggagttagtaaataatgatacaaatgtagagaattacgcatcatgaaaattgattgcaatgggaataagtcaaactttttaaatgtaaaacgaaatcactaaaggaaattgaaacaagggtcttgtggataaactccagaaaatatacacacagacataaacataactaagactgatatattaattatcaagctatgaaatgttac

SEQ ID NO: 30099 - DNA, 904 bp, Arabidopsis thaliana columbia
acatggggcccaagcaaagttgcttggagccgaattttagttgcgttgagccgaagtttggcgtggccacgtgtagctcatccgctagagcgacgagtgtgtcatcacgagcggatgacacgtggatcgctgactcgcccaagcacttgacatgtggacctgcagactcgcccttttcccttgcctatataagccgaacacgaccccgattgttttgtgaagagaaagtgagtggaagtgagaggctgccgagttgaaaccgtccgtccgattcaagttaaggtcccatagctgaaaactttgcccgaatcgttgaaaactttttgttggttactgagtgagttctggataatggtttaagtttcatattcatattctcatgtattcttgattgattttgtgagttatatggatcgtgtgaatggttatattggaatgcatatgtgatctttagattcttatgctattatttatggttgggaggttgtgttgggatattgatgattctatgtgtttgatttaaccatatatttcataatatcttaaactttggggtcttggtacatggtgattgtggtaggaggcaaagaccataagcgtgccaagatcatgatatgtctgaccttcatagtgaaccgtgttatcgtggggtcttgtaacgatttacttgatcgccatgtagtgcgaagaactcagagagacggggttagctaccctggccgagtgtctacacgacggtgtagagtttggtagtgatgctccggttgcatacctttgtcgttgtaatgcgggagatcacgggagtgtgtgtgtttggtgttaggttagaaggcagcatatcgggccctttaaaactcaataaaaattggagccttaatgcatgtgcatatttttttgttgttgc

SEQ ID NO: 30100 - DNA, 493 bp, Arabidopsis thaliana columbia
gcaaagaaatgttcgatttaaaagaaatattttaagttatcattaaaaaataaacttagtttataaaaggctattagtttggaaaaacaacataaaaattaggtttataaaaagtttttagaaatttagtaagagttactaaatcatttaggataaccatacctaaaacttaatctttgtaattttggtacacagtttcgaaaagttctaaaaaaataaaataaagttaggtttaatttttgaaaatttagaaagaattactaagtcatttaagatatctttatacatttatagtaaccataaacctagaaacaaaactatgatatttaattagaaaaaactttgcaattttggtaattattacagaaaacgaaacgtattttatatattaaaaaaatgctctaaaattttttgcataactttttaccagtttctgccgacgacttctttggaagtgtaacagtcatattgaagaaccagcacttgcatacat

SEQ ID NO: 30101 - DNA, 553 bp, Arabidopsis thaliana columbia
atgattggaacacatggtaaaatccaagctttcttttttcttttttcacaattaggcttttgatcagaatgttatagctattgatttgtttggttgaaaccctgttttggcctatatgtatatgtattgaaattccaaagctttacatgctcaaaacggatcaaaatcttgaaaactattactaaatgatgtagcaatatgcaaaaatacatatatgttataaaagcaaatacaaagtatcagatcaatcattctcgtttgaaaattggtaagaaccatcgcgcgtcataacatggaacggacaaagaaacaaagtaattcggttgttcagccttctttgtaacgagactggatataaaaacattgtttttgtcatagagacctccaagatcattggcattgaagtagatcaatttttttttaaaaaatcctatattgtcttcggcgagaactgtgatataccaaatccaaaagaattgctttgttcccaaagaaactattttcttccatttgttcccttcgatgacccatcttgtagattcaaagtccatat

SEQ ID NO: 30102 - DNA, 659 bp, Arabidopsis thaliana columbia
cataaagagactatagttttcaaaacaaatggaaggaaacagtgttttcattatgtgatcatagtcataaagtattaggagaaagaatcgttttttttccttagacatccacctagttggcaattctagagatttgctttcaggtgtcaaagataatcagaagagaacattaccatgatatattggtaataaatcaggctgtaccaacttcgacatcatctgaaccatcagctgccgctactaaagggcccttcaaaccattttcattgtgaccgataatctcacgagctgccttttcaagaaagtccttcgcagctgactgaacagactgtttctcatttgattggtatttcctctttctcgcagatgtttcagaatacctgatcctcgatttctctcctttactgaggtctctaatgctttgcttttgggctagattcatttagcaatgactgttagagaaacaatgatatacagtaaaagagagaggtggaaacaacaaactgtacaaaagcttactcgatgtaagatcaggtagagaatgttcgatgaaacgggttgctgcctgacggtttaagacagtggtcgggcgcaaaggtcctacggtaaaaaaaaaaaagagaaatagataagagaacatttagaggataagatattga

SEQ ID NO: 30103 - DNA, 446 bp, Arabidopsis thaliana columbia
tggatcccacgtgttctgttattggaagtgacttgatctttcttaacatatacaaagacaagcttctaatgtccaacacctcctttatttccgttaatacaaaatcccaccaattccagtacaattaacttactacacaacaccatacatgtctctttcctatcaaagtctttaaactaaataactttttccttaacaaacaacagagagctttttcctcctctaacctttatctaaatttctagttttgaatttaggaagagatcctcaacaaatagttatcaaaaaaaaatgtataattttcgaaaaggataacaagtatactagcttgattcgtaatttccatttcacaagtattaatgagaatatcgagataaaggaaatgatgagtgaacatgtatcggattctgtgatggcaaaactcatatagggaaaattgatattat

SEQ ID NO: 30104 - DNA, 978 bp, Arabidopsis thaliana columbia
tctatatccgggactccaacttgctacatcattataaagagctaaccatttacaactatcttctcactgtgctatcatcctcttttttgctataccaactcctggttgttttttcctaaattaaagagggactatacttatttttctgtagtaatttcacttttatgattgcaaatagtccatggaaatattggtgagtaaatgaaaaatcttgcagaaattagagcaacatccaaacacagagactccataacataagttattccactgttagatatacctctctacttgtgggttttgaagctttaatagaatctgtttcactcccagaggaactacaagaatcagaatctgaaagataatcacagaacacatcagtataaaaagcacttcctatgagtaaaaataaagcaaaggaatcaattctacagtttgccaaaccacaatgtaagaacttaattcattcgtcataaacgataaccacagaaactaactataatatcctctatagcaagggaataaccacacttactagagcagagaaaaagcatcgaaaagataatatgggacacgacgtaggctcaaattacaaaacaagactcaggagtccaatactaatcatttcaatagaaaagttactttatttccaatcttaactattcttacaaactgtacaaatcaatgcactatttaagagaaacaaaatgattattctaaggaaatagaagaaggctcgcataaacacgaaccactagatgaagagcctgattcactactagagctactcgaactgctgctttcattatttctacatgcagcatctttttctatcttaagaggaggatggcttgagaccgaggggtcattcccaccaactatgtcaacatcctcgtcaatttgcagatcacctgtgattatgagtacatcagatactcagattactgaaggaaatcattttcgacatcaaattaaatagca

SEQ ID NO: 30105 - DNA, 633 bp, Arabidopsis thaliana columbia
attacatcactatttcctcaaaatatatgttttcattatttttaaaagattgtaaggaagctttcactaatagtaatggattaacttggcatgtggcttacttttatctatcaaatgtaaatgaagagaagtagcagtagtgtggatttatttctatcatcgcttatctttctaattatattaaagataaacacatatacaaccaaaaaggcatgtatgtaaagacagaagcacatatatataagaaacccacaagtccacttctctaagaagatttgttcaggcacacgctaaaacacacaaacaaaaaaacaactcttcaagaacatatacatttaatatttatataaacaaaaaagaatggatcttgatttaatacaagatctgcccatcttgaatttcccaccagccatcaagatccgagccaacaccaacagagatgatgacggcggcggctgcaccactcccacttcttccgaccacaagattcctcccaccacagccaccactcctcctcctccaccgcagaaaccccgtccaccttccacaccgtcgtctctcggcatcagatcttgcaagagaaagcttatgacgtcattgtccaagtatgagatcatcgtcaacaaagatgag

SEQ ID NO: 30106 - DNA, 494 bp, Arabidopsis thaliana columbia
ttatgaaactgaagtaatctagtacatctggtaaggataaaaagcatccgagtatgaagctgcttgaggacgcccgggggaagctcttgacgtctatcatctaagtcctgaacaatgccttcacactgaagccagaaatctccaggagtagtcatagcacaacttcgagccaaaattagcaagtcttcaaatgtttcctcccactcaggatggctttctgcatttttctcaagaactcccaccaggtccgctgcaaatactgcaaggtcagagtttacttcttcctttgctttctcaaattttgcccgaatcagattcaatacttcctggaaaagacagacgattagattctgcatacaaaaaagatcacaaggggataatagagataggagactttagaatacctccacattgttcgacctacgaggcttccataatggaaagggacgtacaccttttgagttcactcatgagaaaagcttttgatgcaccag

SEQ ID NO: 30107 - DNA, 564 bp, Arabidopsis thaliana columbia
gggtacactccattcaaacccaaaaattagttgcagattatctttagaacaagaatgtagattccttggagaaaaattgtcaagtgacattgcagattccagattccagattcattctttgcaaactgtttgattctacttctggggacaaagaacaagagaaagcctggcaaaaatctattggcaatgcaaggatttcagctacaacagactcacagttgaattacttcactgcctggtaataaataacttgaggggcacattttgaccattgggatgatacaaaagcttcaaatttgaataaatctaagtagagttaaacaaaggagagagaaactaacaaatcaaagtcaatggcaatacaaacattcaaaagatgatcatcaatctttcttatcattggaatctgaatcgcttgcattataccctgacattagaagaacaagaatcccaaataagacacacaattcacaagattccactaattcgataaaagattgaaacaacacaagttctatcatatattattacctggaggcttacactcacttgccaagctgatga

SEQ ID NO: 30108 - DNA, 434 bp, Arabidopsis thaliana columbia
cctgttaattttgcatgttgttgcttggttatatatatcatatatccatcgaggtgaaatcatgaatctgatttggctgatcagaatctgccctatcagttattgtaatctgatgatactagttcgtttcaaatcctctctagctgatttcttcaaacccaagaaaccacattggtccactatagatgtatgtcagtggtcactaaaacgtgcaagatgcaaaaagctagaacatctctaggaatgagattataggaacccaaataccaagagaaaacttttgcttcattgtgttgactttttgttgagcgatctttaacaaaaatttggtgtatatatatatccttgcttctttcgatttttctgtggccggtatctgaacattaggatgcttatgggctatgtacactcttatccctctctcgaattataga

SEQ ID NO: 30109 - DNA, 1309 bp, Arabidopsis thaliana
gttttgtgaacatgagtttgctttttgattgaacaattttatttagaatttggtttgtttgtataggataaagggtcaactgaagttgtattcaaggcaatgggaagagctatcaacaagactgtgaccattgtagagctgattaaggtatttttttggagatttgccctgtccaattcacgaagtgttgttcagatgggtgtttgaaaatgtccctttttaatatgtattgcagagaaggatccctgatcttcatcagaacacatctattggatccacagacatcacagacacatgggaaccaacagaggaaggccttctaccgtaaggggccaataaaaacttttataaaagctcatttttaatatgttctactgtttcaagttttgtcaccatagcaaactttacttatttcttttctttttgttttgtcttgaagtttggagactacaaggcatgtgtcaatgataaccattaccctatccaagattgagcttaatacctcctctgttgggtgagttcgtgttttgttttgatgtttctgaatgattcttttgtggtccttagttataattagattcatacgttatgtctcaagcaattgtggtccttagacttcttattctaataattctaatcaaatgatctttcaggtaccagtgcccaattcctattgagttggtgaagccaatgggcgatattgattatgaaggacgaggtttgtcaacaacactctctgtgttattctgaatctcccttgtacttgctttctttattagtgtcctttttcacttttcttgcagagggttcacctggtggcagagggaggggaagaggaagaggaaggggaagaggaagggggcgaggtggcagaggttagattaccttaaaaatgccctacatagatcatctggcttagtgaacgttgaatattgattttgaacatatgattcatgaataaagtctttttttttttgctgtcaggaaatgcttatgtgaacgttgagcatgaagatggaggttgggaacgtgagcagtcctatggtagaggaagaggacgtggcagaggacgcagcagtcgtggtcgtggaagaggaggatacaatggtcctccgaatgagtatgatgcaccacaagatggaggttacggttacgatgctcctcatgaacaccgtggatatgatgaccgtggtggttatgatcccctcctcagggccgtggtggttcgatggtcccagggtcgcggtggttcgatggcctcagggtcccgtggttatgatggccgcctcagggccgtggtggttatgat

SEQ ID NO: 30110 - DNA, 388 bp, Arabidopsis thaliana columbia
aagagacaatttagaaaataaattttttggataaaattatactaaatgcatagaattgtcagttaaatgaatcttatttgcatgcgagactgtcattgagaacactcttggtcgaaattaataatggataacgacaatagagagtgggaagtatataacagacgctaagaggaatagagaagaataagaaatggttggatcagaggattatgacatttcggaaagaaggagagaagaagaagaccacagaatctggtttatgtgtattcggacagtgatatgacttatgagccaattaactagccacgtacactctctctattcctcttcatatttttaaaaaaaaaaatatacttcttcacctatgtacttttttggagaaacaaac

SEQ ID NO: 30111 - DNA, 539 bp, Arabidopsis thaliana columbia
tcctaactgaaatataagatataacctttaattataaccctgaaaccctaaaaccctaacagaaatataatctttaattataaaatcttaaacctaaaccgacatataagtaattataatacgctaatcaaactcttctttataaactcaaactatttactttgttcataattaaaataaaaaataaactaaaaccctccattataaacctaaaaaccaatatataaatttgaaatattaactaataaatcataacctatcttttataaactcaaaccaacatgctcgactaaattactcttaggagattcgaagatatttctctcaacaataaagagtttaaaattagttctattttatggagttgaagaaatgaaaatgaagttaataatttaaatatttgattctgaacaatctgatttttcttttagcaacttatactctgtttctcaataatgtattttctagggaaaaaattgttccactttgtaattaatctcagcgttaggaattgctccactttgtcaaatattttgata

SEQ ID NO: 30112 - DNA, 525 bp, Arabidopsis thaliana columbia
ctgatctatatacccattataaagtgatatctatatctaccatagtatttaggactagacccccatagtatttttagaatctgaactaatctgccttcagattcttccatgttctttttttttttagcatgaatgtaaaatgggtgatttgcaaaaatagctatttttgatagttcatcaattgtttttcctagtggtagtggtctacattcagatttctgaacttttttgtgcaagttctttatttgtttttgatcatgtttgctaaatttgtgattgaaaaacatctattttagtagggggttttttttttccctatctcacaacaaacgcattgtgtagtagaataattaccttgtgcgtacgtagatatctgtaaataagagtatacaactagattgcattaaaaacgtatagacaacgaggataaacaccataaatttcagagagtaaatagtaaacgaatatgcaacaggagtgaccccttggttgataacagcaacataacgaaatgcaaaagtaaat

SEQ ID NO: 30113 - DNA, 513 bp, Arabidopsis thaliana columbia
aaaaacgtaagtttgtgtttgagtttctctacgaattcgtgttcatatcttttgttttttcagtactatgtgatttactggtttgtgattgatatagaataagaagagtagggtcattgggaaacctattgcgaagaaaaatcaagaggatgttagtcatgtcactggggataagattcccaagagttttgtcttctcaagaatgaaacttgctggccctgttaaacaactccagatggatttgaggaagctcatgcttccctacactgctctcagtcttaaggtctgttttaagctcttgtctgatacgttgtagtattgtaagtgttatgtctcgagggttgtgattttgattgttgctaatgctagttgttccattttgttcatcatcttctttccaggagaagaagcggaacactttaagggactttttgaatgtatcaggtccaatgggtgttaccatttccttatgctttcgaaaacagcgtcttcactgtctcttagagtagcaag

SEQ ID NO: 30114 - DNA, 427 bp, Arabidopsis thaliana columbia
  unsure (1)..(427): unsure at all n locations
cttttgactttctacttacttaaccaaactaaacctaaatcggggaattcaaactataccataaatatggaggccggaaaaaaatcatccaaaacttggtcaacgctgagtccaacgtggccatcagccttcggcgaatgattattcgagaaagaggaaaaagtgagtcgttttaggggaaactgttaccaacgccgaaaaacaaatgctttaactcatcaccggaacaaatctgactcaacttggtttgttacttacctgggcggtgttcacggtgaataaaactagtaaaagtagtaactagttatgaggttacgattanaaaactcttttttgggacacaaaacaaatttatttacttcactatatccgaactgactaatgtgggttacaataatatagattttatagatcagtgttgagaaat

SEQ ID NO: 30115 - DNA, 478 bp, Arabidopsis thaliana columbia
tgaaagctcccaattttcaacttgatttcccgataatctccaattaggaatattaaacgggacttgatatcccataaacgggttaacattgaaacctgcagacctcgatacaacctgttcacgattatagtatggttgttcttgcctctgcatgaattgagtaccatcgtttccctttgacatcatcaagctttgagtcaaagccaagtcggtccacttctccatgagatttgggtccatttgaatctgaccatcatgaggtgaaatcaacgagaaacccatattattgaaattattagggaagccttgaaactgtggctgctcatgaaaatactgtggcatgaattgttggtccattaaattctgcgggaatggtgtgccatggcttgatgattaccctaaacatactacgctcctgtctcgttacagcttcatttaacttgctatccacggcacatgaaaatcccatgtagttgct

SEQ ID NO: 30116 - DNA, 102 bp, Arabidopsis thaliana columbia
ctcaggaattttagctaaaacaccatgtccgccaaggataaaaatacctgcatatggtgagtcagcgcttaaagcttgatctaaaatatcagctaatttaag

SEQ ID NO: 30117 - DNA, 429 bp, Arabidopsis thaliana columbia
ctgtattttatgccttattttatactatttggtgactctttaacaaaaaaaaagtattttacaaagtatttatattgatattaagtctagttgtaatgggcattagaacaaaataaccattaaacaagtttacagagatattaaatattggatacaatggccctataactaatttgtgataaggcccaatatcagtagttgtagaactgaagcccgacccatgatatgaccctcattttgagccttgcgacacctgatgtagaagtgtgaggcaaaatgaacctttcaatgtccatcaaattctgaattgttgaattgtttggtttgaagcttctttcaacgtaaatttcctgctacaaaacgaaagatttaatctcagtaaactagagaaagttagtcgtttgaattacaaataagttactaatggct

SEQ ID NO: 30118 - DNA, 557 bp, Arabidopsis thaliana columbia
tgtacttgaaagaattaaaatatttaacatagtaagaatagtatttcagaaaataaattattctcttagcaatgatttcattctcaagttttgaatatctttagatgttaacttaagtatcatataaataaatgattaaagattttcaaacttccaagcatgtaggcaataggcatgtgagaccagcgtgacactactaagtctataacaaaggctttttaattatataatcaaatctcgcttgttgattagcaaaactggaagacggttcagcgccggttaggttcggttaaatacggctaacatcgtcttaaaagtgagtgttgcacacgtaatttggatgaatccaacggctcgtgggagaaaaggtgcacagagattttagatggaggagtaagtaggtgatcacagcccatcctgggatttgctggtcagcttttgatgtgtaaactaatggtaagttgacacgtggattacgttgagaagagcatcttttaagaataaatgcttttctaatccttcacgcagcgcccagcatttaaaatagcggacagtga

SEQ ID NO: 30119 - DNA, 161 bp, Arabidopsis thaliana columbia
tttttaccttcggaaccaagaagtctgagacattcgcttttgcaccaatctctgaagccattcgcctctggaaaaccacagacacatgagaaaatcaagccaatagtttcggacagacagagcgatcttcagtaaaaagcaaacctgtgagttttgttact

SEQ ID NO: 30120 - DNA, 533 bp, Arabidopsis thaliana columbia
caaaacttggtgtgacttttttttgtctcatctaaaattgttttttttttgctttctatttgatcaggaaaattcgcggatgtctgctgggaagcaaatacatccgtttttctcgacttggaaaggaggtaaaagaaatcaagaagctgttgcagcagagaatggtacgtgtcttggtcgagggagagataaaatcgtcaccattggccctatccatgtatttgacaagtttcaggtatgactaatacatatagggtaacttcttcgatcgtttgtaataataaaggaatctgaatagcaaaatcttcttcttaggatgattatccaaccacccttgattggaagaactggactttctatgagcaaacatctactactgagagtcctgatcaacaaataaaatttaactctcttgaacctcggcccaaggagtttgatttaaatgaattgccatctctttcacatcctgacgtgtgtgtcatcgatgatgaggagcctgaacaatgcactagtcaatcagaaggtattgcaga

SEQ ID NO: 30121 - DNA, 522 bp, Arabidopsis thaliana columbia
gatacaagacgcatcaaataaagatgtaagagaagtagaaaacacttcaaccaacatcactgtgggaagatgtccattgtccaagataatattgggacgtcaagaatcaaggaaaaaaaacatgaaacacaattcaacgtcatagcgaatattaagctatgacgtgaaaaccaggtgaaacaaaacttaggggaaatcaaatctagcaaacaataaaatccggtcacataccagtgacctgtaaaagacgtcttggtggaatcttgtcagactgacggggacttgattgaactttcagaacctatgaacacatcacccatcaatcagaaaatgcacagacttaacaatataaaaccctagagcctaacttaaatagtattaatcaaatagctctgtccccaggggtgtatagcaactgaccattttgttaaacttctcaatagttgccaatggaattgtaccaagtggaatgacttttctggttccttcactcttcacaaaagagaaacaaagaatatattg

SEQ ID NO: 30122 - DNA, 839 bp, Arabidopsis thaliana columbia
ggagattgtttcttgtttacttcattattaatcctacattattcattgcaatttttattatataaaagtacattactcattgttaatgacagtttatacaacgaagattaaacggattcgttttgatgtagggtaaaaatttccatcattcaattggagtaaaaagtatctaaacccaaaagcttaaatacattatacatgtgatgtataacaaagcttaagtaaatagtaacaactaataaatgacgtttaaaatttggacaaataaatgactgttaactgttaagagttaagaagagttaagacagtaaaacacttgagaatttgttacagtattttatttattacagtattaagatttggttgtgcgaactaaagtactttatttaaagacaacattttggcgactgtgtaaaaacaccaaaaagaagaaaatgtcgaattcgagtgacaaaaccctagaagatgaaaaggtgcagcagcagcaattggaatcggatgacaaaatctcaaacacgaaccaacgaacagagccatctcaggaatgggagacaatggctcgagcttgggtctccgctttccccgacgccaaagccgttgtaagcgccggcgaagtcgagacttggatcggcaccaacttagattccttaccggcggatctccgtcacatgcctcgctccgagattgtagatcgtctcctctcaatccaacattacatgagaccaacaccatcatctgatcaaaacgaggtaacgtcactcattgattgatccatgtttgttctcaggatttggattgattttgtgtatgtgttgtggatgaatatccacaaaatgtgg

SEQ ID NO: 30123 - DNA, 619 bp, Arabidopsis thaliana columbia
gccagtgtgtgatagacatctctgtaatgatttaacaaaactcaaatacaacatcaagtttggaagatcactggactgttttgtgtttgatcatttactcacctgtaattcttttttactaatatataacttataagaaatcataaactataatcttttttttttttgggtttaatgagacttttttctgtcctttttttgaacacctgtgaatcatagactataatcgaacttcatccccttttttttttttttgggaaacttagagaagaacaaaacatttgtgaggctgatgatttgatgagaccgcaacgttggagaactttggagtatattaataatatacattttcaatattatcagtatatgcattttcaactaggccttgctttatacaccggagattataattaatgaaaagatgaattacgttaatgtcattgcttctggtttgagttggcaaactccacgtaccacgtacatataattattattgagtagttgctaattaattatacttttgtcttgttaaaactagtattataaattggttaatgccataaagcaaacgatagaccagacacatctctgataatccagcggtacttatttgtcatga

SEQ ID NO: 30124 - DNA, 562 bp, Arabidopsis thaliana columbia
ataaattaaattgggccatgacccaaaagaataagctcaaggttggaacaaaaactatattacgctgaataaagcccattggtcttctagtgttatctgcgatttccgatttgggtgattcatcagtgtttgcttctctactcaaatttaccattgataacacacaagcgtaacttagtgttagactgtgtgtgagaacctttacataagaagactttatattaattaccgatttacctaagaacttttatatctctcgaatattacataaacgtcagtgtgaaaaaaataaagactcaaatttatttgtcttcaaatgttttttccattgatgaaagataattagaacatcaaaatggcttggtgtagtctactcacaatattgacaatagttttgcaatcttagtattaaacatggtgtatacattatctttctttaattacgaattgtaatttatatacatcaaagattatcacataaataaaacaataaaaacctgtaatttgttctcttttcttaatcaaaagagttactcaaagattaaatttcacaacaacaaag

SEQ ID NO: 30125 - DNA, 720 bp, Arabidopsis thaliana columbia
ttctaaatatttaatgatccattaattaataggttgccaaattcctttctatacgattttaccatttcacttgtttaaatactactatatgacctgagttttgttgctaataacaaggctcattaggttttgggtatatagtacatatcacctttttatctttttgtattggttacttctgtcagactgtcagtagtagtctcaatggtaagttttcttaagaacatagtaaatttttttagtggatttagtaagtaatatactaatatttatcgaaattatagtgtatgataatacatacttgtgaaactaatttgtgttttgacaccaaattgattaggaatttaggatgttctttcctcagatttaccccccttttttttttttgccttttgacgtcaatttgtgttacccagttatgggttgttgttacttattactgttatctctcggtttgtgagaatttcttttctaaaattagattgtcaaattctgtcaataaaaaaaaaaaaagagtacatgttttcttagtattgactttttcatcaaaatatgatttcgcatgcaaagattttaggaaatatatatccacctgatgtgggaatcaaaatcgtataacaaactttacttttactaattacttacttatccattgcttaagagtcgtgtgacaaaagagaggcagagagggatgacactaaaggatcagcccgtgacaga

SEQ ID NO: 30126 - DNA, 609 bp, Arabidopsis thaliana columbia
tcttctatccgctctattatttcctgtgatacaataagaataatatatatatatagtaaaataaatattggaccagtttcggtctagacataacggtgagagttaatattaaaatttcaggcgagaaaatgatacttgaaaaatattatgatcgttttggatattccttacatcgagtgaatgttggtttgattcatcttccaagtgttctgcaaacgtatattaaaggtttattaactggtaagagattaaccgggttttggttcagcatataccatgattgactaactgatcaaatagtctttacttattatataaagacgatactattggtcatgctacaaaatcaagtcataccatatcctgagaatgaatgtggagaatcgttataaggcataagtgtgggtattgatcgtggtacgaacaaccgccttggcatcaacattagccacgatatccaacatttgaagcattgcctatgcggagtgtttggttggttttgaaactgatgatgataccagaacgagaaatgtcttgtgaagtataatgttccgatgaattgggattataataatgtgtagacatttgtaggtggttttgatgatgata

SEQ ID NO: 30127 - DNA, 474 bp, Arabidopsis thaliana columbia
gtcaatattcaacaattatttgtaagaaaatgtgtaaaatgcatgattaaaggccaacttatcattagaatttccttaagtttctcggcttgaacctatataaaagagtatcagtagtattcagtacaggttcttctcctcctcaaacctaaaagttattgttcttctcttccagtctttttttaacagccgttttaccgacctctattagaactaaaatatgattgatgtactagcgatgaaattgtccttatcgttatctaatgataaaacttgttgaactatatggagccgtcctcaaactttagaaacaaatattctcgtcttcaattatggcgatttagcataccttatatatttggtaatgtgtaacgtaactacttacgtagatcgttttatcaacaaagtttaggtaatggaaaaagggctggatagttaatctttctttattactatgtttatttttttggtatt

SEQ ID NO: 30128 - DNA, 423 bp, Arabidopsis thaliana columbia
ccctttgaaaggtaaatgctccacgcttaaatgaaaatcatacaaatctaactttcttgtatcttaactaaatcgataatcagtcattttgtcatattcagtgaaactattagagtactgattccatttccatagactatcaccttatcattgataaattttgagtctttatatcatgatagtatatagagctcacacatttccaaaaggttactagatgagtcccatgactttcttactttttacccagaaactttagtaataagaaaggcacatatttcaacagattaatctagcaaagagatcatgaaagtgatgaacatgtagcttcaggagctttagaagacctatctctagagaatagcaattgagaaagcattgtgaccaaaccatatatataagcagtaacaatgttggtcaagc

SEQ ID NO: 30129 - DNA, 460 bp, Arabidopsis thaliana columbia
aagtattcaaagcatactcagttatagtaatctgaccctattgagtagaatccgaagtcggataaaaattatcattcttctactttacttagcaatggcgaaaaatagattgaataaaattgggcattaattattattgtcagtaagtattgcctccttgacgcgtgcatgtcctttaaactctctactccaaattccaacaccaagaataaacatcctctgaaatttgctaagattaatctcttcttgcttgtgtgcatcgtcctcgtcctcgtcctcatctatcatcatcctctgaaacgtaaggctaattaaaatctcttcgtaaaatgccaatgatgtttgtcatcctttctgtaatgatatctataattctatatctttcgcttgtacgttgcagattgaaaatattggcaagaagtagttaaaccttaaaacccgagtaacagattcttacgtt

SEQ ID NO: 30130 - DNA, 419 bp, Arabidopsis thaliana columbia
tttgaaactttttttcctatagatttttagttcatagtctaatgtgatattgcttcttctaatatagtatgtgattggatctttatctagaatctcattcactaaacgttttcagaaaaatactgagggtcaaacaatgctagcttcgactttaatacctcaaccacatcccacatcccgagatcatctagaagatgatgttcacatgtcatttggaaggttccatcttcttttctttcttctgcggctttcgcagtgttgttttgaagggatctcactcttcattctcattgcgagtttgcatggtcctccaactttgacctacttctcttgtattaaaacttatccaactttttttctatatgtgtcagtatgttgttacgaggcctttgttctggtgaagctgatggtgatcttga

SEQ ID NO: 30131 - DNA, 627 bp, Arabidopsis thaliana columbia
atcccctcagaacttttggagcattggattatataaaatatatttttctcaatcaaatctttttttagttaacaactttaaattaatcgcaatagaattattcatgaaaaatgttatttacatataacccaatccaatgatttcaaaagagatattatagaattttgtaaagcattaaagatttaactacattttgttacatagacccataatcataaaacctttgattcatagtttcattcttataatggtctcttaagtatgaaggtgttgtagcggagactagaaatatatatgagggtaatgtttgtctgttgagacacatttttacaagctattaaaaaaaatgattccaacaatatttattgaaagtaaatgtattttattaggagattttaaaattaatgtcatattctaaaatgtacaatatatacattattttttgaagattttacaataaatttcaaagtgaaactgaaatgattttattaaatttatatacataactctttgtgtttttttgacagtcatatatataactcttaaacacaagcttttacagaacatctacagttattttaggtgaataacactccaatttcaacaatttaaataaataaatgataa

SEQ ID NO: 30132 - DNA, 1122 bp, Arabidopsis thaliana columbia
catcagaggaagagcttctcgtcgggtcgaatccccaggcatgcggcgtctttgatggtcgccgatgaaatgatcggcgtacctgtcccgagaaaggctcgctcaggtttgagttcagttgattctttctgttttataactcgcattttcgagatctctttatcaccggattattctgtttctggcggttgcagcatgtttaaagaggtcgcatgactgccggacttcgtcgggaagccatagctgcgaagtcgtttcaccgtcttcttcaactctttccgtcaaagagagaaaggtgggtccattcacttcttcatcatcaacatagaaatgatttccgtctaatatcattttgttccgatttgcccagattgtaaacggatccaaatcccggatacccaaaccaccgaaatcctccggcacggttgaggacgacttggagatcgaaatagcagaggttctctccggattgaaaaagcagcctcatagctcaaagagaggagacgattcggagaattctcaaaaatcatcggaggttaaaggtattaagcagttacctgcaggtgtagagatttgcggtttattcacttgtaaagcgagattcgactcagccaacattgataaatcgaccaacggagctaaaacttcgttagtagtcgcctcagatattgtggatgagaaagaaccaaggcaagtttcggaggtgccaaaagggtatatagatcaacaattagatatattctgtgtgtgggaatctgatatctgtttttctatttttgggtctccagggtatcagagggtccacaattggaaaacaacaaagatgagagtcattgtattagtaagctcgatattcatctcatggtgagaaatctgtcccttctagattttagcaataaaccgtgtgaatgctgctaatgtagtaaagatccttgtcctgtcattaggttcctccaacattgccttcctcttcagggagagtctctcttctcccactcgtttctgattattgcaaggcaagtgttgatttaaatagcttgctttgtttaagatgcccctatttggttttctaagactgtttctgtcttgctttatgcagcgagatagtctctaaagagcaaa

SEQ ID NO: 30133 - DNA, 545 bp, Arabidopsis thaliana columbia
cttgcatagtttgttcaacttgaacattcaaaggcagcacaaattgccttaaatggaaagctggagattgctggtaggacaatcaaggtgagttttgaattccttgtggaaaaatgatgagttcttttgaattgcatgtatctaatgtttactttatccgggttaatattttctttttaggtttcttccgtctctgatcatattggtacacaagattctgctccaaaatctgctgattttgatgatgatgatggaggtggactggtaagctagagatcctggtccttttactctttgtctcctttaacttaaaggtctgtttttatgactctctctcgctccctctcaggctttaaatgcacaatctagggctatgcttatgcagaagctggatcgttcaggtatcgctacaaggtatatctgtctctcttgtccgcatctattttaccatttggttccaaatcttttatttgcgagtactccttataacatatggaattctaccacagcattgtgggctctcttggagtaccagggctaaatgg

SEQ ID NO: 30134 - DNA, 511 bp, Arabidopsis thaliana columbia
ttcgatcatacagattaacaatagcaaccttcctgcaacaacaacaaaatagtaactcaacgttaagagaatttacttacagagaagttctcacgaatctgcaaatctctctaccaaaaacaaagacaaggcaacaacatttcacaatgactctgctcaaaagtcagacaattcaaatttctggaattcaacactattatttactaaagtttgcaacttgtaaactttacaatgcgagggacagcgaaacaatcaatacaaacagaattacagatacaaaagccaagtaagcttcattctttgatccaaaaagagaagagaagagaaagaacatgaaacctgcccattagagagaggaactgagacattccattgcaataagtggtctttccgatcctggaggacctattactacttgtccaaacaccatgcttctgaagacgaagaagaagattgataccaatcggagtcaaacacgttgtataatatcagagccagtcagacaaaaaaa

SEQ ID NO: 30135 - DNA, 593 bp, Arabidopsis thaliana columbia
gtttaaaaagttgcaagttcagttaaaaattagttgtgaaatgtttgttgccttgtctttatttttgctagagatatttgcagattcgtgagaacttctctgtaagtataatctcgttgtgttactttttgttgttgttgttgcaggagatcctgcaaatgatgcattaccgtatccatttttaagccaactcttacaaaatggtaaaaagaaatcaggtgtatattggttccttgccattgatcttagtttgtcttggtttgtctcatcttatgactatgatgtggtagcttgcatgttgtatacggttgatacacacaagcttgatttctctatgtgcacttcttgtagttgcgtatgaagaagaacagtgctatctatctagattctagagtaatttgtatataataatagagtactaccaattgatactgagccttaatgggagcatctacttgtcttgtgttgttttctttttctcttcaatcattgttctgttatcgtcattagtgtacctccttgttaaagccggattgtagatacactgaaccatgttcttatatatgggctttatgctgcagtgcttttatatg

SEQ ID NO: 30136 - DNA, 837 bp, Arabidopsis thaliana columbia
tctagaggatcggatcccctgaaggcttgcttccgctctccaagtgtcctcagagcaccgtatcttttgtcattaataatttctctcatggcctgtgacagaaaccatctgaaacttcagaaacatgctcaagaacagttaatagtgaaagttatactacctgttcccatgtccagtcagatccaactttggcggatttcaaaagtgatttgaagacatccacagcttcctatatagtgaagtaaaattaattatgcacacagataagaccagaaatatgctcagacataaaaccaatcttttatcggataaatcaatcataccaatttattgttaaaggaaaaactctcttgatgaatttgtttttcttctgtttggctctcaaccttttcactttcaaccataggtttttggctttcttttggtccactcccactaccttgctagagagcagatcaacaattatgataaacggatacagaagaaatgcatgctaacaagaaatgctcatcgcttagctttaaatacatttgcgtttttagttgacatgtcatctgaatctccactgttcccgactgaaatttcgtccttctcaaccctgcaaagatagatgatagaaacttatttaggtcgtgatactcacaactaaaactaaatagaataaaagagaaagggagataaaattgctacaactgtcagtacaatgtagcagcagaagtttcagtcacagggacagaaagaccatcggtttctgaagtatcacacaattgtgatgtttcatctgcactcatctgaactcgatcaacattttcgacaggtgaagaacttccaggaact

SEQ ID NO: 30137 - DNA, 236 bp, Arabidopsis thaliana columbia
gaatctagagagcatccatcaaaagaaggttgtatctgtgattggatttgtcctgagtagtctcttcacaagtcctaatactatagcaccttagtgagattaaagtctgggagcagactctagttatgacagttgcacactctatattatcgcgagagcacccatctacgacttatcaagaccagagttattggaacaagttctgattatgacttcaccatcaccaacaagagtgt

SEQ ID NO: 30138 - DNA, 552 bp, Arabidopsis thaliana columbia
taagatttgttatttttattatatttaatcatatatatgaaccaaagttggggttgctctaaccctttttcatttaatggcaaacaattttttgtctaatattgtatttagccggattaaaatcctaaattaacaattaatccgagaaaaccaattaggatagaatcatatccaaatttatattaatcccgattatcaaaccttctcctacataatgaaggttttaaaacttaaattacaatattaagggtttgataagtgagagcgtatgtattttttgttgggttaaatatatatacaaaaactttaacaggacttgatgaccaattgatcatatatttgatagtcatttcttctattttttcttaattcctttatgttttatattgatcatttaaaaaacattctaatatggaattttgatatatgtacctagattaggcatttctagatattttagttttcagaacaaaacgactaatatttagcccaaattaggcttttcagcatattttagtttcaaaatgaccgatctgataccgaaccaaatta

SEQ ID NO: 30139 - DNA, 460 bp, Arabidopsis thaliana columbia
tgcgtgggtcaccataccagcttcagtcaggaagtgaaattttgaagggagaagaacaagacccgggatcaccatggctataataatgttggccactataagcttacagaatgatttgaggaacatgccggctaaccatatgtttaaatcccagtaattatgcattacaaaccatataaccattaagcttccaagagctacaaatgcaaagtaagagggcacacttttctttgtaaaacaccgagcaaaataaagccaagcaactgcaggaagcggagtaaactgcaacacaaacacagaatatgactcccattgtcactattgacggatactactcgtcttactgcaacacactttcactacaggaccgcgcaggtcactcgttatccatgacaatagtaatacacgctgtgcaacgggaagaaaaatacttaccagacctggaaatcctacaacgata

SEQ ID NO: 30140 - DNA, 197 bp, Arabidopsis thaliana columbia
tgatgataatattccaacactacataaataagtacattggctaaactgagtcatagcctggtttttggttttcgctcaaaaacttaggcactagattaattttcccaaaacataatcttttgttatatactagtagtagataatagtaaaaaatctcttaacaaaacaatatttcccttgcgcgcctgctagcagtt

SEQ ID NO: 30141 - DNA, 520 bp, Arabidopsis thaliana columbia
gaaactaccattaatgatgctctaactagtgttgtatgtgatgacttcgtaagtctatgagtcataactcattgtaaaactttaaagacctttaaaatttgtgaagaaaacttcaacagttttttgaccaaaaaatcgaaatattcaatagtctagcagaaacagatttacatatttcaccgaccaaagaaaaagaaaatcatattttacgacaacattttgttctaacgaagttttttctgacattaaatttaatatgcattaataaacaccaaaatccaatatatgaagaattttacaatttctctcatttccatgagaccatgaccccaaatcgttacttttccatcgataacatagaatcgttacttttagaagaaaaacaaaaacaaatcgattaattgaccccaaaataagatggaataaaagtataaataaaacctacactaaacagaaatcaagaatatacacgtggcaatcgatgataagctaatcatccacctctccaccgacgaacgct

SEQ ID NO: 30142 - DNA, 888 bp, Arabidopsis thaliana columbia
ttttcttacatcttttgggcgaagaatgtagaaaaaaaacaaaaactcaaagctatttatttacttgttcctgataaaaaaaatcagagattgtgataatccctaccatggagacagcaaatcggagattgtcgctactcgcataggctcagtcgtgaggtgagaaacactgtccaatagtaacagcgcgtgcatcacattgcaaagaatatagtacccgcggatcgaggacaggtgtcgggacgttagaccattcgccgattgtagcgagcaaggtctgggacaacgtgattttactcagctcatatcaactaaaataagcaagtccagttacagtcgcagactcgcagttatatgtattttttttttcttcaaaaacaaatttttatttactttgactaatgtgatatgtatatgaatatatgataaatacgacgagtaagcttaaaaactcactatacttagctgacaaataaaatactaaatacaaaacgaaaattaatatatttgacatttatttgaaaaagttagctttcggtatttgaaaaaaaaaatcgagagatagttattgcttcacatgagaggaggacgaaagcaaaaagaatagcatgagagacgtgaattacgagaagggtttggagctacggagtagagtagaaatgatggctgcatcatataaggaaacattttaaagctgcctccatgttaatcttggcttcagcgcaatacctactattagaaaattttaattatcttaatacaaagtttgttttatatggatatcccaatacaagtcttaagagaagcccactgaagtaattatacattactatgtgttgagattccgttttttttttatataaatgaagtaccagatgagatgttgtc

SEQ ID NO: 30143 - DNA, 471 bp, Arabidopsis thaliana columbia
tgatatcaagtaaagaaattcccacttcatagcagaaattttcaagcattttacacatacttcgtaaccaccaatatcgtcaagacacgtgtacgacctgcgtagactttctccagcaacaatcgttgacttgtcttatctacgactacgactcaatcaaaaccttacacttcctcctccgtcactatcaatggcggatcatctcttactctctctttctcaatctctctctctcaatctcatactgatcccaaacactatccatggattaccaaatctcactaatcctagccaccagcataagctccatcttcctcttgcctatcgtcttcaccgtcgttatgatcgtatgtcgccgatcgtctccaatccagaatcatccactgcggaaacgtaacttcccctgaccccgatcccgatctatacacggtaacagtagtcgaaagcttcgatccatctatctgtgaaata

SEQ ID NO: 30144 - DNA, 554 bp, Arabidopsis thaliana columbia
cccatcttcacatgaaccattgttatagtcttataaaccaatggtttcaagtattttgttaattattatcttaaaataaaatttattttgtcttacattgctctgtcacaacacctcttttccaagactctgaagttgacaaatccttgtggcttttagggtttaagaaacattctgtaatctttatgagatgttatcctataacagacaatgacaagcaaattagaaagaggttttaaggcttaattaagagtctgaattctagctcataaacgttgtcaacatctcaatagaattgaaggattaaggaaaggcttattctgcaaagcaaaacaataaaagtttcagaatttttcaaaaaaccacgaagagttatcaattattaacaatccacagacacatcagagaaaacacaaacgaaacaaaataagcaaaaggaccctatgagacactgtccatgagttgacgaagcttggccttgaagacggtataatcagagaaaagctttgtccctaagatgtaggagtcacattggttctgagtacatgagcgag

SEQ ID NO: 30145 - DNA, 472 bp, Arabidopsis thaliana columbia
ctcgacacgcgcgtcgagaaagattggagaaacgtctatgacaaataatgatacattgatacttgatacataacaattccacataagtatatatgatcaattaaaaaaatacgatacaagcaacaatgatattcacaattgaacacagtgattaaaataactttaaaaaaatcgtaaagaaaccttaaaacatgtacaacgatattgacagatcacgtcagccttaagacttgtgtattagaacatgagcatgagcatgagcatgttgacaaataaacaatcaatagacggaaaaacatgttgaattttccagtggaatcttcaacgcatgcaaatcgaaacccaatctccactatataataaagaaatcgattcacacaaaaaaacctcaacaagtcgaacaatcaccccaattttgcatcattttaaccgagagagagagatcattcatacactttggattcaacacgaa

SEQ ID NO: 30146 - DNA, 488 bp, Arabidopsis thaliana columbia
ttcgttactatcgaaactgtatcacactttgcggttttgtcattattcagagtcaaaacatctttacaaactcttgggattcaaatcattcataccttcataaatttaaaagaggcacatttaaagctcaatcacttctttaaatataggtagatagaatcataattgatacagataaacttagtggccaaactactattagtaaccaaactcatcttttcattgaattattttgggtaaaactaaagatttcaaaattggatacatgtagtattttttttgtttggaaagtgtaaatgtgcattgacaggtcccatcgtcatgtcatttggactatggacgttacgcttttgaccactcttttgagattttgaccaaaataaatacatacaaaaaaactttggggctactctgtgaaaatccactatttatttgtacgagagcgtaataaaataaaaataaaaaaagaaacggcacgcagtttgcgt

SEQ ID NO: 30147 - DNA, 569 bp, Arabidopsis thaliana columbia
tgcgtcgctttgttcttcgtgcacacttttgcttagtaattaagtttttgaatttttaactttttttggtttattgcagaagaaaaagaagtgttcggtcggtggcgttagaacaacgcgataagaaaagtcgtgtttctttttaagtgggccatatttgttgccccttaactagtcgccgcgtatctatcaatattgggccttaattaagcccattagtgaatagtaacaaaaatcatttgggcctcagaagtagaaaaggaacgaagaaacgacgtcgttgttaagataatctctttgattttgtttttagacggctctaggcgattactgttgtggtggttcactccaactccggcgactcttaacgttcggaacctgactgtgccatcgtgtctcagagatgcagtttcttgtaggatttcacaatctttattctattgtatttttaatctgattttatgattctccaaactatagtgaatgactttgtaacttggggaacgaagcaggagaaggtgaagttgataaagaaggaagacccagtaatgttgaagagccctgaagac

SEQ ID NO: 30148 - DNA, 493 bp, Arabidopsis thaliana columbia
taaaagtatagttacatgattaggtcactaaacaaatttttaaattttcaacttgtggaagttgtgattaatttgatttttaagctccatttccatcatacagaatattggtacaacaaattatcctccaacattgagtcatatattacgtgttcaacttcaaagtaaaacatgtctaaattcacaaccgaaaacccacatattatagagaacttgccccatatagcccctatattatattccccggaaacggctagatccaaagcacatgtagacatggcaatttcctattggtttactccggccatggattgattaaaacgattattgccttaaatattcagacgaattcaatggcctttaaaaggcggagagcttcagaacaagcaacataacgagagattttttatatataaaaaatacaggaagcacgagttcaccttaaaaatttgagtttctcttttcttgaccctgaagtttcgttttgatcaat

SEQ ID NO: 30149 - DNA, 546 bp, Arabidopsis thaliana columbia
tagcatgtttacatatattcatctacgtatatatgcgtagactgcagagaagtaagagaagatgtgatcatatgtcatatccatccaacaagctagaagctgatcatgtccacatgttcaacacttggcaacagttacacttcattacatatagatatcaaccacataaaaactattaaatattggctaatataggatattaatggtccaccattatccccctctcctctttctcctcaaacacatattcacgaaggaatcttgtacgatcggtcagactgtataaccttataattctcattggatgtgcttagatttctctttcgaacgtaaatcataaattctaaatcatcggtcttcatcttatttacagatatattatcatatttcactcctccctctactatataggggtaaatgatgttatacagaacagaaatagattatagatatgctttgattttcactgtgaattatgattaagggtaagtcttatactaagagtgaagcgtacgttggagaagcagcaataaggagaagacttgt

SEQ ID NO: 30150 - DNA, 535 bp, Arabidopsis thaliana columbia
tgaccaatctaaatgaaatatgaatatgaatgatccaaaaaaggcgaaaaatgttttttcaaatatgtaaaagtgtatgtatattggttttctgtaccaaaactgtcttatggtatgctttttagtacttctccggttattgaggttttggtattgctactacatggacaaataactttatatagtcagttgcaatctaacatgattactcgaagccaatttgcaaatacgaaagaaaaaacaaagttacaacaaaactgacgacaaaccactgaactataaactcttttcacggatttattagcaccaaattacctgatcttatcgtcgacggatgataagaaaatgaataattatactacaaattttactacagatctctaaatatatactccataaaatgtataatcactagatatttatccaaaggccaaaattacttcactattaaaattatgcaccttactttccgttattccaaaatcaactctcaagacaatatgaagacaaactcatcaattacacaatatgaaga

SEQ ID NO: 30151 - DNA, 513 bp, Arabidopsis thaliana columbia
tttgttttgtaagcaatatacaatactcttacatgcgaatttgaatctgaggggtgatacaacaataacactagcacacgatattagaataattttcgggaacactccccaagttaattttttcaatttttttgaatgtttatattattacaaactacaatgtaatcttaatatgttaacctaaacaatatgctcatgttcatttatcttaccatggttttgacaggtaatggaaaaacagttgtaagttttgactcatgttaattctacaccgataattatataaaaagaaacaaatccgttttcgttgtaaaccataaaccagactagtcccaatttaacaaaattagcttggtgtcatgtcctatcttcgttgtacgctaaaaaaaactcccaacattcttaaccaaatccttcatcaatttaaatacaagatgacgtgaacacaatcattatgcttctgggatgcaagcagagaggacattgttgaggaggtcaagaattttaaaattt

SEQ ID NO: 30152 - DNA, 455 bp, Arabidopsis thaliana columbia
caaaatattggacattgttacgaaaattagataccaaaagaccacatgaaggtaagaacctgtttgatggtggttggcgtctaagcaaaccaggtaggcgtccaagcaaaccagatgatgcagaagatccagccaaatgattacgtgctccgttttctctactattcacaggtacaccctgaatttttcctgtctctgaagcaaaatccagaaacaagtctagacatttttcaagataaccaaaaccacaacgaacataagacaaaagagaaaactatctcttgcacaatttgcatcttactaccattagatttatacttgtttctgccacctcgagaggtattgtaactgtcattaccgcttctagctccacgattcgggacattacgcgtccaggagtctgcatggtctttagtctgaacaaacagacaaataaatgacaatcagataacaag

SEQ ID NO: 30153 - DNA, 284 bp, Arabidopsis thaliana columbia
ttgttagatatagactttttgtcttgaggatagaagggatgaggctaaaatgatggagatagagaaacaaagttgtcgctattttgtaattaaaagtatatagactttagaaatcatagtttgaacttattcattacgtctcaaacaattgtcagtcgttttccacttctaacatgcgtgactacagtcaagtataatcgtattggtgatccattttgtagtgattattaacttgttttacgtaaaaacaagtctttgatacaacacgaaactgtgatttattt

SEQ ID NO: 30154 - DNA, 595 bp, Arabidopsis thaliana columbia
aagtgttcaataacaatggtgtattcgaatatcaattaaaattcactgaatacattcattcttcaccaaatgaatccgcccctggataatatacgttcatttatctccattcttaattacatgtatatctgtttatatactatcatagctagtgtatattaaaatatacatcatgcgagcatgcaatgacgcattttcttcattaataacaactgtccaacagattgttttccattatcaaagatgccttgtgttagtaacttggccgttaagtgaatgatttttatcctatggtagtttgccaaaatataattttatgtaatacaaatgttaatgcccacgactcaattggttaaatttggatttcctagtatatacaaattatttacctacaattatattttattttattgtcttgccacttttaggagaaaaacaaaactttatattaatcttctaatatggagagattcaaagttttaaatattctaatactagaataagataacactgcgactttaaaagcaagtgaaggaactaaacgttgcttaggtgacatgattggacttaaataagcctgaataaaggagatact

SEQ ID NO: 30155 - DNA, 534 bp, Arabidopsis thaliana columbia
atttgagatctcaggccaaaagtgaatctgaagaactcactaaaatgcgtacacggataaaaggtatagctaacaaaagttatttatcctctgtgtatttctaattctgtaggcttattttggtatgcttggtttgtgttacaggtcttctcaataagatggcagaatccaatgtagaaacaataactgcagaacttgccacaatctatcgtgtaagctcaaatatcttgagattattataatcatcctagatttcattcttaaagttgcttcaactccattttgttattgtttacatgttacttttacatcttgtaaccctgtaacatttgttaatgcagtctgttgcgagaagtgtgtcctctcagattttctgtgaagaggttttgacaacttatgcgagaggcaatgaacagttaagatctgtacaactttctgattgtccgctcatgttaatgctagccctatagtcatgtgtggactacatgactacattgacgcccttattagtcaatatattgctgaacattattt

SEQ ID NO: 30156 - DNA, 688 bp, Arabidopsis thaliana columbia
gatgaattcaaaatatataagaagaagtagacaagattatttacaatataatacagtacatatttactctacatctgcttatataatttcgttgtatagcagtatcggtataattacgaataagttcttttaattttcatttaaaaaccaaaaaatgttttgattaatttagaaaaatattgaaactttacgagagatgggccgacaagtaagattaaatggtacacgtacccacatcgcatgcaacttggtctcttcgtttatacagaatctatgccttatttgtgttacagacataaatccgtgacaagtgacatcaattcattagggaatattatattataaggaggtgttgatctatagatatatatattatggaaaatttatcattttttggaacgtaatcctttgtaactaaatgcacctatagatacacatcaaacacttcatttgttttaagtaatttaatagactttttaaaggataaaatcgaaagagatctcaagagaaatagggagagatgagcatcagtgagtcatatccaccggctttccggtgtgtaaccaacgacgaaaatcctccagcaacaccggttattgtccagggcaaggatatcaatatcccggttatcgatttggaacgtttggacaaggagatactgagagaggcatgcaaggagtggggaata

SEQ ID NO: 30157 - DNA, 506 bp, Arabidopsis thaliana columbia
gcagtaacactagctagtttttgtagtgcagtagtcaatgtatagagtaatgttgtaagcaatgcaattggattttgaactatttgacttggagcaaattaaaatgcgtagatcatgatgagttaatccatagtggtctaataaaaaatagagctaagcagtaaattcaaatagtcactactcacgagctcaagttacatgggtgaatttgcaatggaatctttcattttcttgtaaatgttgcacgttagaaaatggtggtattcttcttcttcttctgcaaattataagatcaccaactcaatggaatgttgccgtggaactattgtgtctccaatggcaatcaacttttaataagtaagtaatcgttagtacttcgcttgtaatgttattttagagaaatgaacaatcaacacccccatgtcgatttttcttgaatcaatgtaaacttatattcaactccaaaaaaagtattttgtaaattatattcacaccccattctaaaa

SEQ ID NO: 30158 - DNA, 532 bp, Arabidopsis thaliana columbia
tttttcaaaagtttaaacaaacgatacggacatgaacagttagtctaccgaagtatgatttcagcctacaaatttgaagtcgtaccgtgtcatgagaaatataagtttttcccacaagttttagggattaattttgatctggaattttctttttatgaaaaaaattgatagtcaataacgaatgaaaaaaatgttaatgattgaaaattataacattaaaacgccaaaaatcatcgccccgtcaattttggcaaaatattccattgaactccatggtctataatagtactctaagtctataaactcaatacctacaccaatcaaagccattgtatctcttgtcccatgcaattgtatagtagtcacactcagacaataaacaaacgtaattaagaaactctaatggtgcaaaacaaaattgaataaactcaaggaataaagatacaaaagttgaccagatcatagtcgtgtcacatctctaaggcttagtggcttactatataacggcgcaaagacattttagtgagacaca

SEQ ID NO: 30159 - DNA, 566 bp, Arabidopsis thaliana columbia
cttgggtacggaaaaagttgttcagaaagcttagttcagtttcctccaactcctccatcagccttgattggaggttacaaggatcgttgtgatgggctcctacaattctattctctaccaattgtttcgccatctgcaattgaccagatgcgtgcttcaagacgaccacaaattgaccgccttttggcacatgccaatgatgatctcagtttcagaatggacaatatatcagctgcagaaacgtacaaagaagaggctttcagtaattactctcgcgtaagaactcaggattcaggaatatcaaacttactagccataaactactattgtttcttaatttatgttttatcttgtaggctcaaaagctgataagcctatgtggatgggagcctagatggcttccaaatatccaagattgtgaagaacattctgcccaatcagctagaaatgggtgccttctggaccggctagaaatcaaagtcgtctgcaagatcctggtccaagcaggaaacaattctcggcttcatccgaaaagctctggaaattatgaagttttgggccagaat

SEQ ID NO: 30160 - DNA, 506 bp, Arabidopsis thaliana columbia
caatcaaactaaaatacaaaaaataatttatattaaatggaaaaacaacgtactttaaataaatgttatggaatgtgatttttttataataatgtattctaaatgaaatcaaataaataggtcaaaattcatatgtttagaaagtaaagggtattattcataattaattataaaatagagatagaatatacttaaaatattatttttgaagtagaaaataaaggaaaccattgaaaaaaatttgtttcgtttttgaatagctctcatgttccctttaaacacaacaaaacttcttaaatctctttctactctacatatccctttctcttttaatgattagtgagaatactattttacccttatgaataattgaaattgaattaaaattaaaaaggaaaaaaagagtataaaaaaaaaagaatcaagaaattattcgatatgtttaaagctccttcttctccaacgacttcgagctccgacacctctctctcgctgctgcattgttg

SEQ ID NO: 30161 - DNA, 517 bp, Arabidopsis thaliana columbia
tgctgttatttaccattcttaaaccttatcgtcaataactctatcacccagctatcataacagtttattaccatacattttttttggaaacgagttattacaaatttcttcgaatcgagttattgccatttttacgaaaaataaaacaaaaattataattgctcatgatttcatatttttctatatatgattctatggtctaaccattgtcagcatttccgaacacaactgaaattgtcaaagacaaaggtaatctaaagacaagaaccaaagcactccaaacccttaaagtgttctttactttggttttaaaatttgaatctaaaatgaacagaagaacgttcctcgttatatgtgtacactctctcaacactgtacttaaaaataaaataaagcacagtgtagtttcaatttcatatgctaaatgtaggattatttttccacggtcgaaaaaagcttaaagcatttttaaccaattctttatttattttttaaaacattacaaacttttcatatt

SEQ ID NO: 30162 - DNA, 297 bp, Arabidopsis thaliana columbia
cctatacagtcatttttcaacagctatgttcactaatttaaaacccactgaaagtcaatcatgattcgtcatatttatatgctcgaattcagtaaaatccgtttggtatactatttatttcgtataagtatgtaattccactagatttccttaaactaaattatatatttacataattgttttctttaaaagtctacaacagttattaagttataggaaatcatttcttttatactctgtttatattaggaaattatttctcttgcaacacatttgtcgtttgcaaacttctcaaag

SEQ ID NO: 30163 - DNA, 606 bp, Arabidopsis thaliana columbia
aaccaaacaagagtgaatcataaaacaaactaagaagaagaagaataaaacgtgagaagaagaattagggtttggtgataaagtaccccaagcccagagagcgacacactccacttctttaattcacatcgtttcgagttcttggacgaagatgaaggtacggacatggaggaggattcacccatgactacgttgggccttcagagacagcattgactcacctttcggcaatgacattcgtagagacatcctataacactcgacattctgaataattgagatttgagacttgagatagagagagagggatttataagtcttcaaaatggttgactagttcctaatctttcatctttggggtttggccaattggttacttaacacaatatttgactgcaaattagcaaaaggagatacaagacgaacaattgtcacaaaagtgaaacacttattaacaagttcatatttcacacgaatttacatttctctccccggtagaataacattcttttcttattttacagtattaattttcaaagttttaagaaattgattgattaaatttatattgtttatgtatctagagatattaaaatattacataga

SEQ ID NO: 30164 - DNA, 440 bp, Arabidopsis thaliana columbia
aaatatacacactgtttaaatttgtctacccaatcggaatcatagaaactttattgtttacccaaacaaaacggtactgaatatcggaactttttttattaaaaaaaaactgtgagagagaaattgaatcaacgtccaagtcacttgatgcaagaaaaaagcgaaaccaattaaattcccgtaaaaacagaacacaaaagaacaggagagttaatgttctaactgacacgtgtccctaccttgccatacactcacacaattaaaatttctaactctgtctcttatccgaaaaataatcatctccaagtgtaataagaaaatcaaaataaaactctcatttcttcttcttcctcgcctataaatacaactccattctctcatctcctacatcacaaaacaaaaacctcacttaaaaaaaaaaaacagaagacagaaaaaaa

SEQ ID NO: 30165 - DNA, 567 bp, Arabidopsis thaliana columbia
taaagttataacagtttcatgttgtgtgacatggatctctacaaatctcaggcatgtcgctggttttgtaaaactatatttgtcccacgttgtccataggcaattcggatcgagtccgggtcggagttttcggtttcgggtttagaaatctaggacgcattcgggtatattaaaatttgggtttagatcggatgtggatcagatattttgggttcggattcgggtttatccgaagtatccaaaaaatctaaaatttgattcagagttctcaaactcagcttcttcaatttatcaacaatgcttttgattctttctaacgtagagatttagtcattgttgcttttagatttgtaacataggtaacggatttgaagaaatgcactatgtaagctaatgtttatgggagtgaagtgaactttttttttaaccataaaagaacaatgatacattcatcaaattaacctaaacctacaagagaataagttagaggaaaaggttaaaaaagggcgctaagtatatgcccaaggatggaggagtagagacttctatacaaaacattataaactg

SEQ ID NO: 30166 - DNA, 487 bp, Arabidopsis thaliana columbia
cccactagatttttatgtaagaagtgaattttgtttactaacaccatgatttataaatcaacttttggttgaaaaaatgcaatttcatggagatgcaagtggaataattaagttcaagttgattctttaaccaaaataaaaaaggaagttaaagttgattacacatgcatatgaatctgattttttaaaaattaaacattctcctatcagtaagtcaggacctatacatactacgcagtcgtaaatgcttcacagcagcagactcaagtaggaccattacatgactttattcacgtaaaatccaaatatcaattatatgagtgaggaaaaaaaaatagtaataattatatcagtgaggacactagcttgtcttttttccgagtagtcgatgccggagaagtaatgtatccttcttcatagccatcggaatcgccgtagcagcaaaagtagccatcgacaaataaagaaggctgcgaaatcagaaagt

SEQ ID NO: 30167 - DNA, 566 bp, Arabidopsis thaliana columbia
tgaacacgttttccactttttccaggaggctgattagtacttcaccatgccagctccttgtgttttttttctgttcagtgtttggtaaatctctttaatgcccactggccgtatgagaagaccattacggtgtgctggggtcacatgatatgacgccacccttcaactcttcttaccatacacacatttaaatcccataagttcactgtctaggtccattaacgttgttttcctgaaagcccatttaaatatgggccataaatggtcataatggccagaacgcgcaacccccagctaactacatgccgttttggagtttctcccttttcatttcttattggagaaacgtttaatttttattcttttattttctttgctcaagttttgttgatttgttagcagattttctgtttttttcttaaaggatctcaaactttgtgttttcatggctaatagatataaatcatataatttgaatttacaaatgctattattcaaaagaaaaaaaaagtttgtatagaaacaatagatgtttacagaggtgaaagtgtaaggaatgagtgtga

SEQ ID NO: 30168 - DNA, 603 bp, Arabidopsis thaliana columbia
gctaaagcattcacttcctcctccacgcgatccaatgcgatctgagtcgaatcagccgcgttaaggaactcactgttgatctgaagcgctcgtttctcgatcgtcgatctgagatttctccgtgcgtgacactgttctcgtcgtagaatgaggataaagcgttaagcgacgccaccagatccggactatctgtacgacaatccaataccttcttcaatttccgggagagccccggtgctaatcccaccgtcgaagccattgttactctgcttcgtttggttttcttctacaaacgatcttcgagcattgccttcttcttcttcttcttcgatctctgatgatcttcttcctcctgcagaacggtcggatctcaaatgattctatgggtcaaaaactcagtaagtcaggcccagattatattttatttatgggcctcttataatggcccattatagatgacatcaaatgaggcagcaatttttttcaccaaatgagacagacataatccacattggctatatacatatactgtttcaatatatataaacacaaaatgtgttaaataatttattcttaaattatatgacaaacgtcgatattgtg

SEQ ID NO: 30169 - DNA, 538 bp, Arabidopsis thaliana columbia
cgattgataatttgatacgacgttcatgaaacgcaacatcaacttctcatctacaagagtctcaagagagaagctccggtaaacgatgaggaatagcttgagaattacagagaattctcaagtagtaacagagaacaaaatgaagaagaagatacaatctcagattttagcataatgaagtgtcttcagcttcttattgacctcattcttctgttcttaatattgaccgttgcttttaatcttcaattaccaccgtccacgtgtcactcatttatcaccatccttttcctatatcagtaatgtataaacaccaactcttgtgaaaatgtgacagaagagagaattggaaagaaaatgaaatgtgaaaggaaatgaaaatatatcacaaaatgtgaaagtgtcaacaataaaaacgctcgaaagagtttaaaaattgtgaacatattgtgatgaatcatcatgagcagtgacttcatacttgatattacgagtgagaggccactatccactgcattcacgtcctcggcgacgaaggcga

SEQ ID NO: 30170 - DNA, 527 bp, Arabidopsis thaliana
atattaattaatttcctatgtgtaaatagatatatatgtttaaaataatcttgtgtctatttaaatacgtcatcatagctgacgataatggccaatgactaagcatgaacatttgggtactcaagtcggtttcggtttgggtctttcgagttcgggtttttcgggtttagaagtttaggatccgttcggttatatgtattatttcaggttgaatttggttcggattcacctcgggtttagttgattcgggtattggtcgaaaaacttggtaaataaccaaaactattttgggtttgagtactacttactgaaaccttgtctaaatatatccaaacatgcaaacatacataacataccagtatccataaaacccaaaagatctaaaaataacacatattttcttaagacaataacataatacaagacgtaaactttattttgagtttgtccataatccaatcattaaaaacattataaatccccagctacagtatatatctctctcactgtacatgtgtgtatatata

SEQ ID NO: 30171 - DNA, 529 bp, Arabidopsis thaliana columbia
gcatagatttatagactcaaaaatcaacaaaaaacaacactatctaataaaatattctgattcgtctactcctccggcgttttctctcccaaagtaagtgctggagaatctcataaaacaaagttacattataaaacaaattcgtcgtttggtaatgatatgtgtgactctaaatcctttgccaactgatacatatatttcaacaaagagtacaatttgcgaagagacctagatctttctataccttcaaaaggatatggtaagacaccaaattggcgaccacatgatgcatcgtcttacaagcattgtaaatttaattttaatacaatgtcaggacaaagcgaagattcaaactgaagttgctgacagtagttaagtccttggtcttcaagactagacaaactttccaacatacatcaaactaagtctgaccatacatacatcaaacaaagcgttgaaacgaattgagatgtggagactttttcctgaatcaagatttatatcaaacaaatttacatgacggttaggg

SEQ ID NO: 30172 - DNA, 483 bp, Arabidopsis thaliana columbia
gggattcagataaagatgggaagatcagtttcgaagagtttttccacggcctctttgacactgtaaggaactacgaagaagacaatcacaattctacgcatccttaccatgacttgcctgaaggcccagcaaagcagttgttttctcagcttgacaaaaatgatgacgggttcgtaatatacgagtacacaccatgattagcatttccattaataccatacatcccttaacataattgccacttatctacaggtacttatcagacgttgaattgcttcccattatcagtaaaatccatcctactgagcattattatgcaaagcaacaagctgattatataatatcacaggtacataactttccaaataaatggtgtatttagctgctgaattgttccatgttacatttatgattcacctcttctttccctaatcgtccaggcggattcaggcaaagatagacgtttgactttggcagagatga

SEQ ID NO: 30173 - DNA, 568 bp, Arabidopsis thaliana columbia
gttaagtttcaaaagtagacaaatttacacacttatctataaaatcgttttgtgtatatttggttgagcttcttgtgtatgttttgttataggcagacgagattacgcagaagaacatgttgcaggaattatgtatcaaggctcgtgttgtctgtttattttaaatataatatccaagagatatttgcagccatggtaattcatcatatatgcctctcaatctccatctatctttaaccatgaagtttccgtttacaagcttgattttctagaattcaaatgtggtatttgtaactttcattaggttattagtttgaatgacaaacgtcttttctatagttttgaggttttcaatctggttttctgattgttgttgtaaggttttctcattcttatttggtaatagtttgtttatactaggacaagagaactgatttgaaatttttctttgttccaggggatataagggaaacatggaactcaacaaggaagatatcgtgccattgacaccagcagctcaaatcacagcacctccaatcctacaagatggctcatctcaacaaggtaa

SEQ ID NO: 30174 - DNA, 509 bp, Arabidopsis thaliana columbia
tttcaactaacaaatgaaaataaaagagacctaagggttagaggattgaaactatactctcaagtcttttatcactaggctactaccagctagttaacttgatggatttaagcaagaaaacgtagaatttatattcgagcagattgtttagctaaaaaagcttgggtttgaaattgccttttctcccatataagcacgtcggttcctaaataactctttctagcggagagtgtctttccaataatttaataaaaatggtgtttgtatatcagaaaaaaaagtaaaaagaaactgatcgagatagaacgtttgcagttttataaacaatttataaaacataacgaattaaactcaatgtattttctattaattcacaaacaataataaatcataggatcgaatatttacacggtatcagaacctactcgccgctactatatgaaaattgaagtcagatatcaaccgcaattattaaaccagcatgacaataatgtcataacttaatatga

SEQ ID NO: 30175 - DNA, 408 bp, Arabidopsis thaliana columbia
atccccgattcgctccccaactgaagccgcctcaaagaagtacttgagattagacaaaccaccaccaagttatctgaagcaataacaaatataccaaatatcaagctcatgatacttaagatcaaaccattttttttgttactagaaataacttgagtgttttctatttacctgactactattctacagaaaataaaaaacaccaaacatgttaagttaaactaaattaccataacatccaaaggtgcatatggaaaaaagaattcaaactttgtattacaatataaatatgtttgaaaagaaactaaaattatgttcagactgtttcattgtagacactttcactagaaaaatacgcatttctcgtaagctctgggatttgatttgttatgtaccattgatacattt

SEQ ID NO: 30176 - DNA, 548 bp, Arabidopsis thaliana columbia
aaggtaaatatatctaatcaatggatcgtggagggtctctttttggaagttcttagcttgtttttacatagatagcattactttggagtagctttgagtgagttggtttcttttgtttgttaccatatctagatgaattttttttctcaacttttattgagagcatcacactttatgatctagatcaatgatagtttgtagtattattttcctattatgtaagtgctaggaacctaggacacctacttgatagttgctcgcaaaaataattgttttctgaagtggtctctggttcatttttatcttgttctcggacctcgtcatttagtatcttatttattttgcatgtatactgtttgcttcaggcaaaagatcaaaaccagtggcggatgtcttttgtcatgccctcaaagtatggttcgaatttgccattaccaaaagatccttcagtcaaaattcagcaagtgccacgaaagattgttgctgttgtcgcttctcaggtaaagatacttgatttcacttccatgtgtgacgagactctagtttga

SEQ ID NO: 30177 - DNA, 514 bp, Arabidopsis thaliana columbia
catgattgagagggtgaagtatgaatatacaagaaagaagaacgtcaattgtctgaataataacttgtatgttgatactttttagtggctcattggacgaagaataacactgccctacattgtttagttcactctttaaaaccaaggtagcaatttcacgaaatccaaatcgtccttcctctttttgccacatttgacatatgtataccatattttttctgtgttgtagattttatagtgaagcatgactagctgaagattccacaacaattagtcctcataagaatggaggaaatctcaagttagaggatgaagtgttttcgaaaactatttcctcatactgatgattaaagtaaagttatgaatatatgttattcttgacaaagagtgctctttttgaggatttaattaacatacatattggaatataaaacaaatcctaaaatactactgaaaccgcttagacagagggaagaaggagatagacaagatatcataactacttagacaacat

SEQ ID NO: 30178 - DNA, 657 bp, Arabidopsis thaliana columbia
tgctaagttttcccgcgaacaacgaacaaagcaacattcccacttttagcctttaacttgctttatttattattattaaaacgatgagaataatttaaatttgtagattatattaaacgatgccgttttctcacatgtgcaaaacaaattaaacaaatgaatgggtctacattgtcgagggttgggagaggtggcccatttatatttattaagagagcgaaaagcccgatctctttcatctcttgacaccgacacttctttaaacaatggaaacgtttttttttatcccgagaacacaaaccctatcgttcttaactctagaaaacaacactcagttcttatctccattcaacgaacgacggagcgtttaaacatcagtcttcctcgagaagctttaccaacagagaggttcacacagcacaaaaccccttcactcactggcgtatttgacagttagggtttcaaaatccccgccatatttcttctataatcggagtgttaatggcgtctacagcggctgaacaagacgagagaaaaattgtatcggtagcatcgaacgctagccaggacatcaaaacggctgctgctgcatcgcggatcagtagccaaaacggcgcttctccatctccgtcgctcaactccaaggacttcatcggt

SEQ ID NO: 30179 - DNA, 530 bp, Arabidopsis thaliana columbia
tgaaaattgttatctcactaccgtagtaaaacgatggagataagaaaagcgagaggtcatgtgggagagggcgtgaaggatggggatgctccctgattagaggggggaaagagtgtcctatcatcacatgggaggttaaactggttcttatttataacttcaaaatattaaaacataaatagtcccacctttgtgtgctcatcagcaaacatttttctttaatgtccaatttatcacaccatctccttgttttctaatacatatcatacatctactaatcatcattcattcatatcttttgcatatatcatcatcttcatcatcatcatcacgtgtttagatctagcaaatggtttgttgttatttatgaccaaaacaacattaccatgtagtatttatataaatcctaaataaaaattgaaactcactgatacaattaaaattaaagtatttgtacaaaattacatattgacgaatgttagttggaaatcacctgtctaagttttttagacaagtgccaaagatattgg

SEQ ID NO: 30180 - DNA, 1280 bp, Arabidopsis thaliana columbia
atagtccatttctcaaaccatatctaacaaatccctaagtttaaagtgatcaaatttatggaatgataaaaaaaagtttcaatcgaagagtaatacctcgtttcctctcgattttgccgttagaagaagacatgggaagagcttcatccgccgaggcgtaaccggccggggttttgttcatatcttgttcatctctatcttcgccgtcgatctttggagtctccgccgtctgttcatagtcagacagattgttcaaactcacgcactttctcatcgggtcaagcacaaccctgactccgaacagcataatctctcttcttgtgccgcttccagcgcaggcggtagtggactccgaagaactagtactaccgtcggccatgataatctttccgattttgcccttgtgctttctttctcctaaagaagcaaagtacacagagcaatgggcaatggagtggtgtgagttagatctgagcttctttggggacccttttataagccaaaagccacgtggttcctttttaaactattacatgttgtaggtgttggtgacggtaccatatgacacgtgttttgtttttattcgtctgttcttgtatttttttcttacctgcctgtctctctacagagttttcatttggatagactttttttattcattggctgactagatttattaggttttttgttagtagtttaattaatcttataggatgacgaaaaaagagttaaataaatgttatcctataataagaagttaaaaaagtatttcgctatgtcgaccaaaaaatgtaggtcgtataacgaagaaatatttattgactttcgcaaactcaaagttaaatacaaaaaaatgaaataacagaatgagaaaaatgaaatgaaatcgacgcttttatttttcttaacgttaccctcatgtatttttatgataaaaatctacaggttataatgtactggtcaacgcaatgtctctaaggcctaagcgcatgcaacttgagcttagaaaaatagtcagcttctgaaatgattctgtactctgctctaataatctatttagttacagctccatccttgtacttttttttcttctaaaatactatatcttgtggatctatgagttgattattaagaaaaaaatcttgggagacaggtgaatcctttttggaaattataactttgaatttcaacacaaaaacttacaatttcaggaatctaattcaacaacaaaaatgattgtgtagtcgaatttgtcgttttctagctaagagtaaatttta

SEQ ID NO: 30181 - DNA, 585 bp, Arabidopsis thaliana columbia
gtaagtaatatctattcacttacaaatgaacgataagcttataattttgtagcttgtacccgtagacacaataaaaatgtatatttatcggtgtaatgttttactatgttcggcaacattttaacaacactttagttttcagtgattatataacagctagaaatgaacatatatatagtgttgatcattgaaataaaaacagctttctggtctgagatgtataaaacaaaaataatggatattttatcccgaaagattatgtagagattggatgaacaaattactggttgaacttgaaattattggactttttttttttaaatgtttttgggcagctatacgagaattccatgggtctttgtccacaaaatgttggcgaccatacgaaaacatcgtcgacattcgacaaagagaatctagtcttcataactaaaatatttttaatccaaaaacaaaaataacatccgacgtacgtgaagtaaaaccagtgtttttcttccacaaattttgcaactatcataagtttttatataaaaacgtgtgtttatcgaacattgagttgatcggccgctaaattttgatatt

SEQ ID NO: 30182 - DNA, 569 bp, Arabidopsis thaliana columbia
gtcccctcaagctagctcttatgcaagctcccaggtattgactcaatgcctataacctgttcgatcatttgcctcaatgaaactttattttcccctggagagttgttttttacttggttgtcttcagttcactgtcctgtctgattgaaaatgtggaacttatagagaatctgtgttaaattatagagccatcattgtttttgatgcagcgagcatgtgatgagtgagaaaggatactcttcgttactatcgttcactgtagcagacattaatacaacaatctctaaacttatggaattaggagctgaactcgatggctctatcaaatatgaagtccatggcaaggtaaaaacgcaaccacttcctgcaaatgctttaatctcattgtctaacatttcttttgataagaattcaaatctttctttttcttgataaccaggttgcttctgtgagatgtcttgatggtcatgtgctcggactctatgaaccttcatgagttttctattcagttcggattatgtggatttgattttgtttttttcgatccgattttggttgaataatgtttc

SEQ ID NO: 30183 - DNA, 559 bp, Arabidopsis thaliana columbia
taaagtagtatatttaattattaagcattattaaaacgaataatacgtataatataatcgtagccgttggatataattacacgtgcgactatctttcgatcgcactaaaagcaaaggaaaggctaaaaagaagctcgagggtcgagatcgatcaaaattgtaaatcaatcataacacattttaactagctctaacacaaactctaaaattttagattaattcagacttggtaacaattttgacttaactacgagcgtcattaccattctatgcatcgttttacacgaattacactcacatctcaaagatacatgtccacatgctacgtaccgagtatcgaccacacccgataaacaacgggacaagccctagaatcccgaaaaggcaaaaaggtcccttgttttctctctttgttcatgttaaacacatactttttaaattaacaagaaagcccagatatttttggtgtttcttactgaatctagacttgaagagaattttaggaaaactccaaaaagctcgtacgctaattcttatcttcacttccatttttcctgtg

SEQ ID NO: 30184 - DNA, 651 bp, Arabidopsis thaliana columbia
caaagtaaagtgaaatatcagaaccatgggccgaagttatacgggccggtgggattgaaacccaatttctagtttcaacggaaacagagcaaaaactttatcaacattactaagaacgcaatccgcttctgtaacgaacccaactaaaccattaaccgattttgtttagtccttgaatttgatttaccttagtttatgccaaaccctctgcccaaatcttggtctttcaacacaatagatagacagagccagtctcacagttgtctgtctctctttggttttcatcctctatgctctttatacttatgtaattaacttgtggtacaaggtttttgacttgaataaattcgagcttcttctcagaaggtctaacatattcaattctcctataaggctaaaacacagtgttggaccatcttagtgatactaagcatccaagattcaaagttgttaaatagagatcaagaatgtttcatccgtttcacttcacattaaccaataataataaaacaatcaatacacaactcgatttttaatcgacccgcattagcaccattttaaaagccataaaggacggtgatgacacaacgtccacaaaatccaccatccgatttgataaccgcaaataagaattatgaggtttgttcagtg

SEQ ID NO: 30185 - DNA, 504 bp, Arabidopsis thaliana columbia
aaacaatttatatcgattatttgtttgttaataaagattacatcttgtttctatcaattggtgcgttcgtgatcgagatcgaagtatcgctggaaaaagttagggtttgagtgatgtggggtttttgagagatcgaagaaatttttcaatcaaagatggtgacgacaccagaattaccgtcgattactgacatgttatcgtgccaagctacgtctacatcagcagatgaagtaggccaacactttcatgatctctgagaccaagtattgagatctgattcaagaccagattccaagttggagtctgctacgagtcaaattgagtgcatgaattgcacgtcaggagcaggcattgtgcgagactcgcaagatgattgacaatgtgcttcgcgctttgcctagagtagcgtcggcgccagagactggagggtcgtagtcatggtggagttacaagatcgcaagatcgacataatcatctctgtcacggaaccatacaatagtgaca

SEQ ID NO: 30186 - DNA, 951 bp, Arabidopsis thaliana columbia
acatatatcaattgtttgttattctaccagttttcatatctaaatttctaatgctcatgaattatcatgatctacctttttgatataaccaagaatttaacttactaattagaaaatgtaaactaacatatttgaaatttgaaacacatattctgctgatcagttttaaatttagtttgagaacctagcaaataaaaatggaaagagaaatatggattacacctttttctcaaaaggatgttgtgttctttctttaattgacctaataattgggcttagatatttagccttggaaatatagtattgggctctaatacaggcctttaatataatcctcttttcaattctggtgacgtggttacgtaaacttacgttccctcccgaaacccttaaaaaattcaattcccgttatgagttttttttttttttttttttaatataacctacacaattggactggggttttgtttacaaagaaaaccaaaaacaaaggaaaaacgaaaaaaattgtcgggaccggaaaagaggatcttgccctagtgacaccgtgacgcagagaagccgaccattagcaccgacgaatgcgaaaaccacagctttgcagcagatcgaagtatctagtaaacagagaggaagcatctgactcccgctactattccttttcccgcgaccaaccgtttccaccacaaatctctcggcatggtcaaccctccgacatcacggcacgccgttgtcagctcccgtacctagcaagccgacaaactcaaacataacccctctttcccaatccaacgaatctccgatttaccgaacaaaaaaacttcaaccggccaagaggaagcaagtcacggtggtgtttgaggccgatggctcaaacgaaacacccaaacacactgaatccgcgacaaccaacaaaaccaggaggatccccgttacctccatggcgaattg

SEQ ID NO: 30187 - DNA, 540 bp, Arabidopsis thaliana columbia
attcttgttgcgcaatctcttttctacttcataatatcaattactccactaattaagaataattaacccactaattgaaaattttatttttgccgacgattttatgaatcgtacataaagacaaacctcaaacaagaggtaaacatcattcttaaaaaaaaaaaagtatgatatatttcgtatcacgaaataataatatgggatcatatagacagttagactaagaatatggtccattttaaatggctttagaatgtttaatgttttcataaattgtaattattcgaagcaaaaaaaaccgtagaataaaaataactttaactgtccaatacttttttttgcttttacatggtaaggtgtgagtataaccaaaaattgtaatcataaacctttcgcagtatactataatctataacccaatatttaaaacataataagagattgtataattgtgtaattcttaaatactattccctctgcttcacattatttatagtttacagattttttcacaaattaagaaacacaaaatttcaatta

SEQ ID NO: 30188 - DNA, 1761 bp, Arabidopsis thaliana columbia
catttccttttcatacctttttaggataaatagaaatcctaagtatattcaatggctcacgcactgacgcacatatttgtgattctttttataggagaataaggacttgcagatttgagattgttgaacgtaactactcactagaccaaacaatataaatagtaattggaccaatagaggcttctgggatacttcaacttctaaatttaaggtgattacctatgtaatttccagcattttaggaaattattttctagatcgtatttgttaatttgcttagaatttctataagagtttttactttttccttacaattcctttattcactttgtccatatattttgttttgatcaggtaagccagtggcacatctggagggttagttgaggttaactatatatcatacacattttcatcatatattttagcttcattctcggagcttcgaacgtaagcatacagctctttccatgcagctttattcctatttttgatctttcggaaatttattgcagcgacgatggaggacaacctcgcgttattagcgcatccacatccggcatccctaaaccttaaatttaaagacactctctgtttagaattagatgtaaatgaatacacttccattaattactttcttttttttaattagtttaaaattttaactcataaaatatgtataatgaggatgctgatcttactctctctactgcaatatagtactactactgaagtctttcatcacatttccatttttctctcttccataaaacccaaaagaaactaggaagaggaaggacaatcgttcccaaaaaaacctctcttctctctcctcactgtaacaaatttttagatctagatctgcttttctcggtgcctttgatcttcatctctttggctttgctttgaaatttcaggggtgaacaagatgccttctccgttggcagtggtgtggtttttctctccttcgatgtagttgtggatccgatgtgttggaagtagagagttgctacgattcccttcggttgtggacgccggttggtgtagcgatttcttctcgtggctcagccgtcgtgtcggcctctgcaactacggcggaagtcgatcgagagaaggtgggtagtgccaattcgccatggaggttaacggtggatcttcctagatttgttggctgtcgcggattcagtgtgtttgggtgtttcgcttgagccttgggcctcaaacaccaccgtgacttgcttcctcttggccggttgaaggttttttgttcggtaaatcggagattcgttggattgggaaagaggggttatgtttgattgtcggcttgctaggtacgggagctaacaacggcgtgccgtgatgtcggagggttgaccatgccgagagatttgtggtggaaacggttggtcgcgggaaaaggaatagtagcggaagtcggatgcttcctctctgtttactagatacttcgatctgctgcaaagctgtggttctcgcatccgtcggtgctaatggtcggtttctctgcgtcacggtgtcactagggcaagatcctcttttccgatcccgacggattttcccgtttacactttgtctctggttttctacgtaaaccaaagcccagcccaattttgtgggttctataactcataaacggccgttttcaataaaaaaaaataaaaaaaaaaagtactactactaatgttatctattttctatcatatgtttctattagtatcaagctttctaaaggggagagtcgac

SEQ ID NO: 30189 - DNA, 498 bp, Arabidopsis thaliana columbia
atggaatcgtcaacgagacacggcggctctatctcttggatggtgattctttggctctccgttgcggcctcgttgtcaaagttagtgagttctctcactcataactgcggaaactccagatctgctcccaaacctgcaaaccccttgatccctaaccactggtctcctacgagggctcgcttccctgaccaagcaaccctagcggtgctccgtcggaattccctctctaggcggctgcttggggtgccggaggagagttttgcaagaggcaaaaccctcaattggccaattggactcttcttttgggatgggcttctcacatagcccgctaagactcccttctcagccgatgtctgacatatttgggcgatcccaatgagtaatttggccaaggtctgtaagcttggaatttccctgctgctctctgggtttaggcccttcctcacatctccaaggccatctccaaaaggtgtttccactgtgtctctgaaaagccag

SEQ ID NO: 30190 - DNA, 629 bp, Arabidopsis thaliana columbia
taaatctcaaactcacgtcaaacacacgaccctaccgtaactcgacgtgacgtaacgccaagctcagaagatttagtgtggtggtggtcaatgcaaatgttgataattgtatcatcacgttgaactctataaagttttatttatttatttttcttttcgataaaaaaaaaggttgtgaaatgtgaactctaataagttcccaaagccattacaagtctctcacattaaaaccttcttcctccattaagatcaaaattgttgttatatttgttgagctaagaacaaaacagaaataactgtttttacagttattggtcggacaatagactcaaaatggattggatttgaactccgtaggtaacttctctagtggactcaacaagtcttgaatcatccccttatcattgaaagcatctttaagattttctttgccttggtcttcgtcattggtccaattagaatgggaacttaaactgcctcgaatgatttggtacttctaatgcacacatcattgatctagacttatggaagttcttacttatgctcttcatattgacaaatgacaacaatctatttccaagtaatttccaatgaacttgtttatcactgtcttttttttgctaaaaaga

SEQ ID NO: 30191 - DNA, 639 bp, Arabidopsis thaliana columbia
ccttttctgaatgtgtgcaaatttgcgttctcttttcttagctattaactgtacacagtacacattaaagtactcatttttactctcattatgagccacattctcttcagctagtaagtagttccgaagaatttgtttctctatataacatcacaacattattttgatatttggaaactctctataggtggacacgttagtcagccatattgttctatatgtgggtggcggtaatgcccacctagatgttttgttggtggcttctttcacgaaagtagatttctgctttcacttcctagctaccaactacatttttgattctaaagtttttgatggagaaatatcttaccaatcagagaagaatctcaaaatcgccggtgtgaattttgatagagaaatagagagacgagtctagggtttatccaagacttgatgaaaattaacatattctaaacgacgtcgtgtgactaaaataattctgttttttgttttgtcaacgactaataattcttcattatttattcttttctaaaatctgaaaattcgccgggagaagagtctcaggtttcaccatctgtctttcagcggttgggttctggagaatacctcagcagccccttctgttttcgaaaggttggg

SEQ ID NO: 30192 - DNA, 964 bp, Arabidopsis thaliana columbia
ttgaaacaatgttgattcagcctccactttcgcctcaatgataaagctcttacaaaaccaccacctgaaactacggaaacattgacgagggaaagccgaaaactacttgaaagagaaagagcattcacacagcactggcgggaaagccacgtggtcttagagaaaaaattgtggcttaggtttttcattatgttactatatcaactcttattggtcaatgattatgtggcttgttgcgaatttgttgtggatttgaggttgcttgatttacttagtaaaaagtaaacttagctcaatcttatgcaatatgttattgatgattgttctttgactgccgcttggagatgatcaccatttatacaataacatagttataatgaaaaaaacaaaaatatgtcggtgtaacatcttcttggatctatatcaagagtcaaaataaaacagattgaggtcttttactgttttttcatagtgcgtttgatgatttgtggttcaggaaagatcgcttgatatctcttccatcttctccattttagactttgtgatagctttgtataactgtgatctttcattttcatgattttttcctatgatttgaagcttagagacccaatgactgaaagaaccttctggtggtgaagttctcacaaagtgttcgacaaaactctctcgagaaatttcttgggtttttttcatatctcgtcttttggttgtgaattaaagctcatgcatcttatgtttatcgtcccactaatggaggatagcctccaaatgcatcaatttatcatgaatctatatattagagcaatgtgatgtttttactatctatacccacggagtcgagagcccttacgactatgatatatccaacttgatacgatcaaacgaacaaagtttcatcgagcagaagtagggagagagaggcaagtttgagaggagcgagaattagggagaacaatgcatt

SEQ ID NO: 30193 - DNA, 560 bp, Arabidopsis thaliana columbia
cattctcttaataagcataaaacaaacagacaccttaatattaagatgtatacgagacaataagatataccgaactataaacgtgaagaaatctttggatgctcacttctttcttttcctctccctcctccaagattaagctgcgtccgatttcaccatcgcagaatataccgccaaacggtaactccgggaagttctctaaaaacggtgagctgtctgcgtttggacaaccaaagaaggaatcaccgcgacagtaccgacgaaagcaaaacctccaacgacttccggtttattcggcttagacttgagatttctaagttgagcagaaacatcatttagtgctgcttcagccactttgagatcagggaggtatacttggaattggtcgccggttttgattccggcaccatcaactaaaagatcctgatcgtcagatctgagtaagcaaaccaaaaaaaaaaaaacttagatgggtcaaaagggacagattcatgttatgatacttgttgatccgatcgttaccattcacttgatgaaatcaagggaggacatgatttttg

SEQ ID NO: 30194 - DNA, 463 bp, Arabidopsis thaliana columbia
gagactttcattataggtgtgcatcaagagcataaagaagagaaggaggtgttgtcttcgtggatctaataagggtcagaaggaattgcacgtgatagaatcgtttatgtaacagttctcataatttacaagaaaaaataaatctagacggcaaaaaaatattatattatcagaatacaaattttcttttatgttatatcgtaacaatggaacatcatggttagtgagagaactaatacaggtaaatcgattatcttatcccaagcttgcatcccctcttgaagcggtatttatggcctatgggcagtagaatgcttgagtaacttcaggaaaaagttggttttgaactatcttctcaacaagtggtggaggtgattgaattctcttggcgtttccccttatttttatatttttttgtgcaaaaatgatgctcttacattcaaatcatgtagagtacttaaaa

SEQ ID NO: 30195 - DNA, 532 bp, Arabidopsis thaliana columbia
attgtgcttcaggtagaagaatgaccaaatcatggaggccgataccttttgacttggtatgttttctatttatggacttgataatgtaaacatctcacacaatttggtaatttaaaataaatcagagtttgttgcaaaagagagagtacatattacataatcatttatctaattgggcctatacgtgaagaatggttaatgggcttgggtgtgagatggaacaaatgaataaaaacgtaacccattagacgagacaaaccctaaaccctacggaatggagagcggcgattacgatgttgagacgaaaagagagaagcttaaatcggttctctctcagctccttgctgatccgattctcgccgacgttccgaggaatccaacactttctgatgtcgtcactcttgtcagccttgagaagggaagcgctatcgtctctccgtcgtcaagctcgacggctcctcccttggtacatatatacttcgtttgggcattatgtcgaacaagtggtgtgcagcattgtaaaattacatgg

SEQ ID NO: 30196 - DNA, 593 bp, Arabidopsis thaliana columbia
tacaatgaaaattatttggaaatagtgattaatacagtatgttatcgacttggtggccgctatttgggtttaaaaatccgatagtttccaataatgagttggaaatcttttagtttagtatttcggatttcctgtgatttactaaatgtttagtgtatagtttatgagattttctaataagatacgattaaataaaccaacctactcgatatggtagtcaaaccgatatctttgacttccccaccaacaaattgagtttaaaatgactcaaacgatgatccactttgaaaagaaatgacatctcctacgattcaattttatgatcatatcattacctcaaaaaagtcgttgtaactcgtaatgcctctgaacactcctaatttctccgaaaacatactttcagttttgcaaaagaaaacagcttgcaaaaatatcaaacaacggttagttttgcgaaattatatcctaaaaagaaactcagatcaataatgtgacgtctatctagaatattagattatgaaaaaataacagtttttgataggtcaaaagtcaatcgatcaaatatataatactagatgttagtcagagtagtt

SEQ ID NO: 30197 - DNA, 524 bp, Arabidopsis thaliana columbia
acacccaagaacacccactttgtctctcactgaagctagcacagtgaggctcaaagtctcagattaactctttaccctttctagcttaaaacttaaaataatttagatttccatattaattttcaattgattcaatatgtgtctatgattagatcttttggttccctatatataattttagagtttagattcctttcatcaaaacaaatttaattggattcattgagtttaccatattggcgacgaagatatttttcgaatcgtagaaaaaggaaacaatgttgatgaaattggagttgacggagatggttttggagttgacgtagacggcgttgacgaagcgatcgcagcgaacgaaagcaacgtgggacttgttaatgatgaactggttgagatcgtgaattgagttttcagagaggtaaaactgtcagttaaactattataaatacctaattatataagccaaatggattgtccttttcaaatttgtgatcaaaatgtgccaatcctgtaatacctatttt

SEQ ID NO: 30198 - DNA, 417 bp, Arabidopsis thaliana columbia
aaattctgatcaaattcatatatccttaatttaccctattaaaaaaggttcgatccgtacaaacatatctaataatctcctaaattttgcatatgaacactgtaaacaataaactttgaaaagtcatatatgtagataatgacgcgttttggctatcacgtaccgtatgctcaagtcaaagtcaaatatatatagtctactctaatattcaatccggataatatctttggctagaatagaacgcgtgaaacaaaaattgttaactgaacgaatgaaaaccttggattaccaaaaaaggattgcttacagaagtgtactattatacagtatatatactattaccaagtttcttttttcttttcctttggcgcagacattagtgtacaaaattaatccaccgttaaatacaagaagaga

SEQ ID NO: 30199 - DNA, 379 bp, Arabidopsis thaliana columbia
gtaacggccgccagtgtctgtgagaaggtcagcagtttcaagtacctgaaaaggcaaacattgtaggtatttctatggataataaaaggatctaatgaaaaacaaccaacacacagaagcaagatataccattgtgcgagcctccaaactgataatcaaataggcatgatattcagctggcagcggaagccagtttagaagaatcagcattatgaccacgggagctcttgtgataaactgtccatattccgttgcaccctggaagttcaacctacccacaagaacatccggaatagaggtgcgtaaggattaaagagactaggtcacgtgcagagcattactaggaaagatcggatacatcgccatttttctagagtga

SEQ ID NO: 30200 - DNA, 276 bp, Arabidopsis thaliana columbia
ggagaattccctcagcgacaatgtcatcaccaccagcccaatcatgcaacacacacctaggttttgatctatttttcacactctacaaagtgaatatcgtttcagtaaacaagttagtccatttttccttagttactatcagatgagtagagtgctatatagttaccactagggcagagtattcacgaaattctggtgcagtatgtctctgtcaatgcatagccaacactgcagatagaattagtgtcaggtatatagtagaataacttgacaaag

SEQ ID NO: 30201 - DNA, 472 bp, Arabidopsis thaliana columbia
  unsure (1)..(472): unsure at all n locations
nnnnnnnnnnnnnnnnnnnnctaaagaaatgagcacacctacggggccggggatgtcgctactattgatattaatacgtaaggagattagtttatgggaatacctggtatgggcgtcggctcactgctgaggaatttcgcctacgatctcccaggagtcctgagctcaggactcccgggcctcgagagtgaccgagtaaggcgctactggtcgagtcagggcggttaaaggaattatgacaagcttctattggctgtagctgcatgcgtcgagctcatgcagcaccgtgacatacgcagccggaatctctcgagaaaactccttttactccaggattccttgcctattcacgtacttgaggatgcaagtcattacgcattcgcgaactgaccatgctagtattggcccagggtttaatcctttgggattttcgcagcagctgtgactgtcagcggttcccccgtgcagccca

SEQ ID NO: 30202 - DNA, 583 bp, Arabidopsis thaliana columbia
ctcacttaataactttttgaattgattgatgatccccatgtttttaataagagagctttaatttatgtgtgcaggaacaaagatgggtatgatattggagagatagacccatcactcttcctctatcttgatggacaaggacatcatgatcctccatcaactgctccttctcctttacatcatcatcacacaactcgtatgcactctctctctctctcttttctttcttttttgggaattggggtttgtttttttggtttcagcagataaggaagattccctttaggtgtgtgagagagagagagagtcacagcaaaagcatgccaaacagatttcaatctttcttctgccatcagtactctattctttcagctttgaccagatcctctctcttttcagacaccaaatctttcaaatccatatatcttacacttctttaaacccttttctctctctgtcctttttcttctaattagaagaactagtccgctcacatatttatatacatgacttgttataactagaccatttctcatacatatggtcacatgactcatcttatggcagagaatttggcgatgag

SEQ ID NO: 30203 - DNA, 466 bp, Arabidopsis thaliana columbia
tgaattactgatgatgagaagaagaacacattacaattggttggagctaatgatgaaataagcggacatgtatatacccagcataattttcgtacctatactctcttatatttctaaactcttgatttgttagttactgtctatcccaattgattcattgggtagaaaagttgtaccttttttatatctttttcttaatctttgtatattcttcggtcaatgataataaatttgttgtatatttatgttgtctgctttattttaaaaatcttagttaagagttatagcagatataatttaaaacaatgttgtccctgcatagcagggccaaatgctagtaatattttaattgactaacaataatggaaagtgttgtttatcttgaataacacaaataattttaatgactttattaaagtatgaatctaataactccagatttataaacactttaaattacttttta

SEQ ID NO: 30204 - DNA, 446 bp, Arabidopsis thaliana columbia
ttaaccaaaattctcaacaataaagctttaaaccttctaacaccttccacagcaggaccatgtgtggataattctagctgtcgattcatctttgttgttctaagattcatgttgcttccctccgaactagcctttaccaaataagcatatacacataattctgatccaacaagtaagtccatgacacttgaaaggatttgtctctccagaaattcatcaacaacccgcaatttatgactcatataagtaccatttaccaagatccctacaggcttccacacatgattacagttaacagaatctaacacaaatttcacatcgacaccagtttgcagtgccagagttagacccttaacaaaataacgaagttgaccctgaactggaaaaccaaactctttgaacatactaattatttcctgaaaacgcatgagaggaacctttgcagc

SEQ ID NO: 30205 - DNA, 710 bp, Arabidopsis thaliana columbia
ctagaggaactacgtttggttaatcataatggaaatcaactaaaaccacatcattagacacacgttgctttgaagctcttcaaggtcacaaaaaataaagagtagagagaaggcaaacatgataggaataagtgggatcgaagataaagattcaagaagaacaagtggggtcgaagataacgatttaagcagcgaacttcaaccagagaattcttcaaaaactcttcaggatcgagaaaggaacttcagaaacaaaacctattactttgaaatcgcagagcttactttgaaatcaccgagcatatccaaatcgtgtaaaaaaaaaagagattttagattgtgtaaaagagaagaagagataatttcatatcgcgtgaatgtgttggatttatggttaagttttattgtgatttcttaaagatattatgggtaattaagtcatttgttaaattagtcacaacgttttaatctttgccgctcaattaaatcggcattcaaaattattcgtcggattccactggcgttcgccgcagcgttttgacgcaagtagctgcagcacccaaatgaacatatatccttgtgtttgatgcaatcgcaactacatggaacgacaaaacgaacgacctaaatatagtaaagtaagcaacatgttcaaattgtaattttaaaatgaaaaattgaaattaaccatgaaaataattacatattta

SEQ ID NO: 30206 - DNA, 615 bp, Arabidopsis thaliana columbia
tttttaaaaattaaaacattcaataattactttgaaatgaccaaactaagtagacgataccaacatctatactattaattgggaaacattttttgaactacaaccttttgatgatagttttttttctttttttttgtcaaaccacttctcatccatcaaataaagaaggatacatagtacaaatcatcaaccataaagattggatacataaagcaaattaagcacaagattacatccaaagtagctaggaaggttgggaaagcattaaacataggggatagatccataagaactcggagacagagactacaacgcaacatatcacaagcgagaccatcgtgtgtcaacaacacttccgcgaacaatttggggaacttaaaaatagtcactatcaaaagaattcgtgactttgataaatgttcttcagtttcaatgattcccggtgagaaccacttggagaaaactaaaaaatttgaaacagttctctccaaaaaagaggatggcaaatctgaaaatctctccaaggtaagacaacttttgcgccaaagacccataaggccaaatatgagttctgcacaaaatgtggtaaagacgtgcgtcttcgacaatctcact

SEQ ID NO: 30207 - DNA, 686 bp, Arabidopsis thaliana columbia
agtatttgaggaatgtgaggttgttgtcgaggacgcagttcttccaccgagccacggctgagaaagttagggagatacagatggatgctcaggttgcttccattgcagctaggttgcattcgtgatacttaagcaaagattttttggtgattactatttctattcgatttttattgggtataggaatatacactatatacaccagtgcatatacaaagttgaattgatcacgttttgggtttatcatcatcttctctgtcagtatttttatctaatgagaatcattttgtttggaattttgtttttccttctgcaattcccatctctcataacttctcatttggtctctctataagaaaatagttcgagttgtggtgaaactcatgacaatccactcaaaagtatttctccactatttagctttgctccaatttctggaggcttcactattgacaaaagaaaatgaagcacttgcaattctcttaataggatgataagtgaataaacagagtataaactcatgaaaatccactcaaatttctaaaatatgaaatgagtccaaacgtatagtatataatgatacaacatgcaaaatcacttgaaaggaaaatgggaaaacaaaaacacgaaaagcacatcaaagtaggaaaagtttcggatttaggtggtaagcccatgatggcaga

SEQ ID NO: 30208 - DNA, 596 bp, Arabidopsis thaliana columbia
caatcagcagaatagagtcgtatacaaacactttcagcccagtacaatttttgactctgtttcctctgcattgcccgtatctattttgggtagaactgtttttgggcggagataaacaccaatgtactgtagtcccgaggcatcataagtcccatggaaaccgccgaactgaggagatttcccgagtttaaaagcaaatttgtcgttgctcgaaccggagtgccaaaaggaccgtactcgctagtgttggtattgaatttgagagacctcatgtgaggattgttggcttcatacttgtaatactctccactgattccagttatgtactcatgcggatagttgagctctatctgctgggtccaaatcacatattaagttataaaaaaaaagttataaccatgttcttagcattttagttggaagtagaaattgtgacggagaaaaaagaagagtcaaaaatcagacttacaacgtcaaacatgttgccggaaaatggaccgtgacgatcggataaaacgagttttctgccatcacgaactggaattggatagacataattccagcgacgccatgagatagaaaaatctgagagatga

SEQ ID NO: 30209 - DNA, 589 bp, Arabidopsis thaliana columbia
ggagaggtttcttgttgaagtgatgtacagctcatgttaacggagatttcatggcaataattccatgtgacactgcttctttattctctactaatagacttttttttttcgttcttttgtaattatggtttcaaaatatagagctcactagaaaggaaacttgaaagctgcagaattgaattgaattgaataccttgactaaattagtcactagaggaattattgaaacaatattggtgtgaaaatgttcacatttcatctcttattctctttatatatatagtggcatggaagatcacatgcaaatatatgagtgaagagaaatttaaaaaacaatatagagagagagtgagaggtttttttatcagttagtttgacatgaaagaagctgctgctttttgggggtgttttgttcttgattttcatggttcttctgtcgttgttacttgtaaccatggccgtatttgcttgcccaaaaagaaggaaaagaagaaggattcaagttgctgttgctgctggtaaggtggcgtttttggcggttgcagtggtgatggtggtggaagaggagggggttgctagataagtagat

SEQ ID NO: 30210 - DNA, 556 bp, Arabidopsis thaliana columbia
agactatacattgattgtgaagaggcaaacactgaggactttgtttaaaataattgttcttgaaggtcacaaggagaggcaatcgtattagagatactgaaaggatatcaagcatttactcaggtaaatgcaaaccagattcgaagtgtccatatgttatgtggctgctaattgtcgatgtgtggaacaaatgtgtccctgctatacagtttttacattgccacttaagcgtatgttgtctacctatccagaagaattgacgggtatccttcaaataattttttcaggcatgtggcgttctccatgctgtagaacccttgaactcttttcttgcatcgctttgtaaatttactatcgttttgccaactgatgtggaaaggaaaaggtaccttgaatattttgctatatatcatatgaaagttacttaatcaatgcaagccagataactttttgttattaaatttgtaatttcagcagcgtcgtacagtcgcctgtgccaaacgttctgaagtacaggttgatctgaaagatgtcattgtcatgacacccaagaatg

SEQ ID NO: 30211 - DNA, 619 bp, Arabidopsis thaliana columbia
ttaaatttcaaatcttcggatactgattaaaacttacattggtgaagacagagaaagttatctcccaaggataaaacaaactgtccttgtaagaagtgagtgaacataagctctgaaactcttcatcttcccatgaaacgacatcgctttctcccacagcttccttggtgaaattcctcttcaccgaccttctcaaagatcccaatgtcgccttaggacctttccaacgaatctccaccgttaatctatctttctccggtacaccttccctcaccagatcccaaccctcaagcttcttcacggaaagcttcacctcgtatttcctcgtaactaacggcggccatggcggctattcatcatcttcaccaccatttacgcaaaaacgaaatttggagtcgtcaagaaaaaaaggagaatcacacagaaacgtaacaaaactctttaggagtagttgagaaatttagggaaacctagagagaatctagaaaaaaaaaaaaaaaaaaatggtttctttgccttcaatctagtttatctaagaataaaaatcaatgcccaaaaatagaaagtagattttagcccagaaatgagaaatctattataagaggtttcgtggaaaaga

SEQ ID NO: 30212 - DNA, 606 bp, Arabidopsis thaliana columbia
tgtaaatagatgttggtgagcatgtataaataaacaataaagcctaaattccacttgtaaacccctttaagcagacacgtgaaagtcacgcgccaagaacaaacttatccacacataaatgcttcagaattactgaattagtatcacaatcacgagggtcatggaaatcgcaaaatcaagaaaaatggtcgagacccgagaatcacgtgagatgagatgagtcatgtgctcaaaagcaatttcacagttgacacataataataaagatggagtgtaacattttcagtgaatagtgatcaatgttgaatccatttatttcagaaaatagattagcctaaaagaaattacagacaagactggtttatgtatgtgcagagccaaacactctctgattctgtggtcgctatcaaacaatctttgtcataattataccatttttttttccaaaaatatcaagcaaataattagatcgtacaaaattaaattaatttagctgttacattcatgctagacctaatttgcgatgcttagttagattcatgtcctgttttgccaccatgcactttcgttcgaacagtttttgactatagactttcataattttgt

SEQ ID NO: 30213 - DNA, 874 bp, Arabidopsis thaliana columbia
atgtatatgcatgcatgaaaacatttttagatttatgtagtaaaatttcaatatctctacagtaacaagcatatatcaataacactaaccaaggaaaactcattctctaattatctcctctcatctttgatcttctcaatattgtctcatttagctaactttagttcctctcaatttctcttattaccatacaaaatttactaattactgtacaaaaattaccaaataaaaggccacaaatatcttaggaagatatgaagcaaggcacaagtgccaatacgagattagagagcatgaattaaggagaaaagtcggtttcggttcagtaagacagacagacaaaatccatcgttggggtccagtcacattacctctttctacgtgatttcctctctctccactcgcttttaatcctttcacttgtataaagtcgtagcatctcgagatcgtcttcctctcacaatctcaaattcttcggaccttttctctctcccctgaagctcccctcactcactcttctccgaggaagaacaacagagacaatggcggttcccaaagccattattctacctatcttgctactcatctgtggtgctgctctcggagctcctgcttctgaaggtaaatcgcgcgcacacacacacacactcactgtctatggtttgcactggtttgctctgttttgcttttgacaagttttcgattctggaagatgggtcttctctacttgtgattctaaagcaagatttggtgtttttggaagaaaaagattcaatcttagtctctagatctaagatttatctctctgtttacttcttcaggttatcttcgtaatggaaacttcgaagagtcaccaaagaaaaccgacatgaag

SEQ ID NO: 30214 - DNA, 874 bp, Arabidopsis thaliana columbia
tagtttctgagtttcttagagaaattgttttttaggaactgtagtttttttaccgtttggatttgccctttgctttttttttattcattttagtttatagtagttcagaactaataagtacataaacgttgttggaatgttcttcaagtacctagccaggttgtctattaatgaatttgtggtattagagattgtttatgtattggtagcagtcatgtatggaattcgtttccactttgctaagttgacgttgttaatgtgtactctttctcttatcatggatcaggtgtgaatcaggagacgaaggttggacacaaggaggacgtctctaatgtaagtaaatgagccgcatcttttgatgaaatatcttcttcctttcggtttcattgtcttttatcttctgtagtgtaaacctatgttttgttctgtgtgaagttgtccatgaagaatggtttgattcggatggaagataccaatgcctctgtcgatccacctaaggatggatttacagatcttgagaaaatcttacagggaaaaacttttacaaggtatatactatcttacaggtcatataacctagtagagtaacaattttccttcgaggattgaaaagtgtcttaatcttttgatgcatccagcattcataaaatagaagagttgataataaagacctatgatttgtccttcttttttgtttcattttggtgtgctcatgtcaccatttataggcattttcacattttgaactagaaagaaacattgtgttttgaaaatcagttgatcactttcaatgattttacaggtctgaagttgatcgattaactaccttgttgcgttcaaaagctgctgattcatccactatgaatgaggagca

SEQ ID NO: 30215 - DNA, 723 bp, Arabidopsis thaliana columbia
gatccccgacagactgcgctctgcaacgtcgatacaagagaaatgacaccttcgatcctattttgttgaatgaaattgatcaatgcaatgagtggctgactgggagaatggaggagaactcatctgatactgaaaatgatgatcttgtgtttgaaaatgatgacttgacatgggctgaagttggcgaggccgcaggagctaatgatccttattatgcaactagatcaacagctgcttcaagtagatttgagaaaggaaaaggtattgctagtgattctggtggacatggtaattcaagagcatctcgcaagacacctaatagttctcgtcctatgactttggttgatgaggatgaagagatggaagatgattttcttggagcagagtatgaggacactcttttggacaaggatgattatgagttcgatgattctggtttttagattattaatggtttaagaactattgtgtttgcaactttgctttgacatctatgtgtttgctacgttgctttgatatctatgtgtttgctagtttgcttttattttacttattctgatgtggattatattgttttgtggtattttattttgaatttcttaagttttactatgtttaagaaatgaatcattcttatacatgtttgttttcaaattgatgcgcttcgtgtctaagtggcgatgcgctttatgcccatggcacacggctctatagagacattag

SEQ ID NO: 30216 - DNA, 593 bp, Arabidopsis thaliana columbia
tgcatctgataataagaacattgcttcagcgacaaagagagagagctcaactcctagttgtacagcctcctctttctgtttatgtttctgcttctcttttgtcctgcacaaattgatacttttcactttctaacacgagtaagaaaataaaccttcaaaagggaatgatgaagatcactaaccctaaagtgtatggagaatatcttgactcttgtagtaatcttttgttgtgtcggagaactcggtcagtcatcgacattaattcaaattgtttcgagataatcgacatgtcagaggaactcattgaagaagaagactcgtgatgcaatttttgtgggctttccaatgcacaaagattaataaacaacaaattctagtcagaaaaatcagatgcaaattccccaaagcatttagttctatggatcggtcaacagagagaataaccctagatatggtaactttagccttcaatttgaaatcaaagagaataaccatagatcgtaactttagcctacttgaaaccttttaaatcaatatgaaatccaaattcctaaaaaaaaacaaatcatggaaaaagaaggtacatgcactga

SEQ ID NO: 30217 - DNA, 608 bp, Arabidopsis thaliana columbia
gctgattctgaattctccaatggtaatggggttctttataaaatttaaatttgttttggtcatttaagaaaatatgagaaatagtgggccaataaaataattaataaattaagaaaacgcccaattcacttcgttagcggggtcggttacgaagaaaggaagctcttttacattctcgtggcaacgatctcatctacgtgtcacgaaaactcaaatctcttactccggcgaacgatgtaccgaacggcggcgaacggtcttctcgccggtggtggaatcactaccacccgtctcctccgattaccgaagctcaggtctacaatcatcccttcctcttacacttccggtctctgcacttcgtcgattggtggtaatactgaatcaccaatgggtaagcagtctgtgaaccctaatcaatcgggtccaacggcgtcgtcttctacgggtacaggggaaggacaacgccgacatgagagcagaaagccgagagctgagtccaagaagagcaggctcgtgttctctctgcgtctctccgtcacgtggtgtgtataaatttcatagattccctcaaagtttcgtccttttagtgatcatttctgtatttggag

SEQ ID NO: 30218 - DNA, 518 bp, Arabidopsis thaliana columbia
aaggaattaaacccaaaatcaaaacatgatctttctctgcacaaaaacgggaaaaataaaaactttacaacaacaaatcagaaaaaccggaactttggtcactccaaatgaagatgatagtaattatgatgatgagtaacattcgaagacgacgaagatgatccataaccatcatcgtcatcatcacgacgaccatcaaaatacaaaatctccggaggtggaacacagatatagttccagaaccataaaacgaatcgacccagttgctgaagcggaaaacaacaaacgagttgtaacatctctccgctgctgattcgatccgacggcggaatccaccgtaatcgctgaaaaatctcagccgatatatgagctacggacaccaccgtgtcgccacggaacaccatgtcttatctcaacaaattttgattctttcacaatcgatctctttgatttgtctctgtgtgttgtaactagcgagttaagaaacaaaaaggtgggatttttccatttcacattat

SEQ ID NO: 30219 - DNA, 1093 bp, Arabidopsis thaliana columbia
caatatgtctctttgcctaagttgctagattacctacctatgctctctattctcgaaaacaccaaattaattataacggaacactatcaattgtagactaaactcatttacatatttttcatatttttgcaaataaaatgaataatatgtttaaataagtcctttgcacaaatttttatgataccatttctttgattattaaaactgtttagtagttgatttgtgaatgttatagagaggatttgaaaaaggccatgtgaggtataagtacgctgcaatctattattgtagtcagcactagatcaatatttgatgttatataaaattatttccataagataatacgtaaagacagctaacgtcaatatgacatgtatgattaaacaatatttttgttttaaaatgatcggattggtctttaattaatggtgtgcctcggtaaagggtacgtcaatcgccggaaaaaaaatctaaaatccgaagaaagtgtgatcgatcgaaaagacaaaaatcaaacggtcgagtaaaaataaaaacctgccgtgaataacacgaatcctcggtattgcagtatggtcattcgtttgttcaggttacttttatctttactttgaacatatgtagttttgctccgtggtccgtgtctagtttcaacatcggtcaacaccggtcaacactggtcaatgccggttctgatcaaagtagaatgtatcggtcaatgttggttaacatcggttaacaccggtcaacactggtcaatgccggttctggtcaaagtaggatgattatggtgttggcaacatgacttatgtttgttcgtgtatgtccgtatgtgatatcaatacttcgtgtagctaacgagacatttttaaaatatgtacgtgtgacgatgtgttggtttatacttcgtgtaactaataaacatttttctctcaaatctaacatatttttgttatgaccaaatttttttaaaaaaattaactcaatgctagaaatattttatttatgctaaacttttctacactagtacattaattatcttcacgtattgataccaatgttataataacttaattttcatacataataaaag

SEQ ID NO: 30220 - DNA, 1146 bp, Arabidopsis thaliana columbia
cattaattggccacattttaatatttcaatatattattttaataaaataaataaatttattatatattgagaaatactttagaataacactgtatctttggagacatccgataaactttagaataacattaaaataagttatatggataattacagcatataatcaacgaacttttaaaattagcattaataaatttacaaaataaatattttcttatcctatttaattaaaaaaataaaaataaaaaattaattaaatattaaatctcaattataatacgactcatgaaatattaattcatttgtgttattttaaaaaactttatagcttatgtgataaaagataacaaaaattatttttgtgtcatttgcgcaaattgccaaaaaaaataggtttgactgatgcagagaaatggctatttgcattatccaaaagccgtcttatccatgaagaccaaaatttcggtgtattattcatgtaaaaattactgtattgatataaaatattggcaaatatcgtactaatgtcacctggaaatttggaatccctcggaagctaatttatcgatttgcttcttcacaaatcaagtgtcaactctttataggattttattcgtatttaggatctttatatttcatgtgatctgctcagtgggaaaaaataaaaacaagtacaaaacacacggttggaactgtagagcggggatgttacaggagctataggcattttccttcattctcaatttctagatttttcttactgcattaggatggtggtagtagctaacttatggaaattatgtgatattttcagttattgtcgcgttactatcgttttactctattagtatgaatcagataaggcctaattagttttctacacacagagtccattagtggctgaatgttgatccaattttcacgaatatcatatatgatcagttcttaatattgtagaagatacactatgtgtgatatgtcctctttaaatgagtttccctgataatttataatatttgaatagttaagcttggaaaaaaaaacatacacaccatatgttagcaatgaaacaattctcaacagattatttattctcatcggcaaaatatataccccaaaattttatcatatttctcgatagagaaa

SEQ ID NO: 30221 - DNA, 889 bp, Arabidopsis thaliana columbia
tgatcaccagaaccatcaaccagttgattttacaagacatgctcattgattgattgattgattgagcggtttacgagggaagaagattatacattttgtgttgttaaaatctgtgataagtaaggaaaaagtcaagtgaggacttcagatacacgaaatagtcacaagaactgcaaatattttattaaacagagagccatagagttggcagtggcatgaatatattttttaacaaatgtttgagaccaacgatcttattttacaaacatgagatcatttctacttcggttaggaataagcaggcaagagaagtaacgccgaggatgaaatcttaattttttgaagtttgggccaaaaatataactgagtatatatatgaaggactaaaaagtaaattaattaaaacgaaaaataatagaaaagagagggagaaacacaaaccaccaccgcagccgtagtagattcctcgggtagaatggtttcgccctccttccgataaccctctcgtcacctgtgactcattcccggcaatgtccccgtaccggccggcggactcagggatcgatgtagactgaagtgttaaaggcaaaagaaacaccgaagttaaatgggcctactatggcccattagatagatataggcctcctaatcataatttaagtcgagagggttctttcgtaaattcaggagaatatgattggaactcattgagaaagctatgttgaatccctcctacagactacagtctctgttctgtggtagcttaaccagttgcagagggaagcatcccgagcccaagctaatgttgaagccctacagtctctttagctttcattaaaaaccgtaagatacattttacccttgtgaatttgcttcaagtgtaactttt

SEQ ID NO: 30222 - DNA, 588 bp, Arabidopsis thaliana columbia
gaaaaagacagaataaaaagaaaacctttgcatcgaataatctgtccggtggtagacattatcaacagtgaagaacttgcttttgatcttttgttagttttgtgtgattgtgatgtaagaaaagagaaacagagaaggggatttatatagcagctggtaattggaagaagtagatatttacaaaaactcaccactagaaattaattagtactgtttattgaaatcttttgtaattatccagtcgacatctgtagaatactaggggcgtatttggttttgccttgttctctcgaacgctctttccacttggcgttgctagtattcgtccacgtggcatttctcgttgatctttttaattacaaattgtagtaattattaatagtttttttaaaatgtggtcttagttaattagtcttgatggtcacgccgtggtgttgctaaaagcagtaatcggtgtaccatcgaatgcttttggtttcgggcggtttcatcttaaatagctctttaatagtattattcttggtcatcaagttggaattttttttttctacttttgtgagatttttaaagttatgaaagatcctaatt

SEQ ID NO: 30223 - DNA, 540 bp, Arabidopsis thaliana columbia
cgttagatattgaataaaattttccacatatctacaaaaatcaaattttatagttaaatttttttccagttatgctgattagatatcacacatgattatgtacatacattgatagtttgatacacacaacttggttaacctatcaatgaaattatattgaccgattgatacatatatatggacttcactataaagataataaaagaaaaaaatcaattatgagttttagccccacatatccgtgagataattcttacagctactacgattgagagaccaagattcatgatctagccattttcttctcttttgtattgtcctcaacgattcttgtttctgttcttcttcttgttcctcatacgtagagctctcaatcttcttgagattgtgtctgtattcaacaactacttgctcgaacacttcgacttcaaacatgttcattttcaccttcgggtttatgtgatcctcacaaacgcaaacgccaattggtctcgcgggttaaacgcttctaactcgttgaacatgaaacacgagaatagg

SEQ ID NO: 30224 - DNA, 442 bp, Arabidopsis thaliana columbia
tcagaagtgtgatgagtcttaagatcaagacacttggattcatcttaactaacatcaataacattataatgcgagctaagaccacttaatactttttaatttacgtatgttcatagatatgataatcaagtggcagacgtattagtgtcatgggttgtacaatacgaatttctattaatgcattaatatccaggttgtcgagaaaaagaaaaacaaaacttagttttgattataatatatacttatgtgtatgttttttcttttttcttttctacttcacgacaaggagaaatagaaaactaattgaaaataatgaaggagtaagaaataatggaacacgtgcggtaacataatgcagtagagccaatgtgtcgcgacaagccaaactggcgcctcgcaactaccacatttaaatcaaaagataaatctttgtttagtgtta

SEQ ID NO: 30225 - DNA, 535 bp, Arabidopsis thaliana columbia
aggccagaagaagctcttaagagtttccgagagaaaaaccattgcccaaagaagaaaaatgtcgtgcgccgtcgacgtctccatcggccatgacgcaactgacggaccaagagggagacctcttgccatcaacgaaaaccagagagagaactctttagcgtgcaaatggaatttaggtcgagaacaaagttgaatgatgcttttagatctgttctaaattttgaaggtttctggaaaatcagacctgtaaatggatctgcgaccaaaagagcggcgagggagaaaaccgagcaccacatctgtcctttgttatgaaaatttgataagcctgtgagggtaggtgtgttcgagaaggttcgagaattttgaaaagttaagaaaaaattagggaaaactttcaacgagagataaaaaaagagacgagagcagaagcggaaagattttgagacgtttagatcccgacgccggtgagcatttgcattgccgacgtcagacagtttgtttggaagaggcttttcgattatcatgccagaga

SEQ ID NO: 30226 - DNA, 514 bp, Arabidopsis thaliana columbia
taagatttggacagttcatagctatcttctccattgacgcatctgtaacatttgggcagttctttatccaaagtacctctagattagggcacctgcaaatggaaaccacatgacattttattcattctatcaaaactctgcgattaacctctatggactcaagctataactgagaattatcacgaaaagtgatacgtacctctcggcggcgtaagatagagagcgttctgtacaatgcctgatccgaatctctgtgagacctccttcactccgatcaacaacagatcggagaaatgaatcgactttatcctcaaactcgggagtccaccagttgatcgactcagggaacgacagaaaccgagtttcgaggtcgaagatggtgtttagtgtcgggtcatagcatgcgttcatccagttcttgctgaccagcatcggtccaatccatctttgttcctggcttagcgatgagaagatgtcaagaagacattctcgagtcaactcagaccagtcaggg

SEQ ID NO: 30227 - DNA, 1972 bp, Arabidopsis thaliana columbia
aactcgatttgcggacataacgaggaaaacgcggaagacagtgatgtactggactttttcatccgctgatgcaacattggattcacgtttaagagtattttggtgtcaacaatataaggaaagtgactgttaatggaggccacgaatttctcagctgttgaaggaagaggacccacaaatttgctgtatacatgtgcaatatctgtatcagatgaacaagatgttagagttaggcatctttaagttacaaaaccttcacaaacgtatagagaagcaacttgctagtttaccgaggaaacaattgtgaccaacgatcagctttttctctgaagcaagcagatcaatcacttgacggaacccgattgcagattgtatttttctttctgccaatctcttgcgttcgtcctttgcctccttctgtgaaaagagacagtaatggtatctaaatcaaagaaggcctttaagtagaagaatcagttactacactatagctacatcatctctcgagcctgaactttgctatcatcaaataattcacttcaacactctcagttaaaatccaaaggacatgtaatgtttagtaacaaatctttccagcaacgtaaatgctaccttaccatgaggttttccttgtcggaatctgaatcagtatacacaacaatgtctcgtgaagaagaacttttatcatttgaatgtatgtacacaagatctccaaaatgctttcttaaaacctacaaagccaaatccaaaaccaactgattaaaaacaaatagcctgaagaaaagatgtaaaacagagagcattaccgagttaagaactctgagctgatgagaagtgaaacccttcagactgagagcaggacgcatatggtgaaacacagtttccatactctggtttgaaccatttgaaatcctcggaaactcagaggacgcattcccaccatgtaacaggccagaccgccattcattcagcaatttctccatccttgcagcgaaaagaacatctgccaatcgcaccaactttaactcttcagtttcacccgatgaatcaattccgtcctcgccgtgtagcattttcaaacgcttacttgcctcttcctcttctcgtctggacaaataagatattcttgggattatttaaatatatgtgaattcctcacattctggaaacaaacttgaaattgctacactttttctctctttagaatcaaaaatgaaaaggagaaaggaagcaccttcatgtatgcaggtgttgaaatcaaactgatacttggcaagaaaatccattgatgtagtctgacagagaaattcatgagctggtggatcaaatgtgagttcttgacgaggaaatacaaagaaattgtgcctgcccccaaaacgagacccgtttagtcaaagctacacaattgaagctaaagagaaagagaaagagagactaacgggtaggacacgaatgactgagtacgagaatcccaacgaaagggacagacaccaaactgaacgacggcgaatttctcggcggagtctttgactttgaggtatctgacgtcgtagcggtcgaactctaaggagtctcgccacggagcgcttgtcacgccagtcatctcaaggtcaatcgccacgaaatctgcagcctttacgagtgagcgtagatcattcagcgtcgtctcgaagttcgaccttgtcacatgcttcaacggaaaagccgccgtcgctgaagctgccgttgaagtagtaactgtctccgccgcagaggagctgaagctgcagacaagagacctcaaaggccatcgcttgtgccggcgcatttttgaacggagagagagagagagaatcaaacgaccatttttaggttttgctctcggtggaaggaaagagggaaagatgatgattccgaggaaacggtaccgttttgtgaatttcagtctttcgaaatatacacttgcacagcctgccggtttctaggttaataa

SEQ ID NO: 30228 - DNA, 864 bp, Arabidopsis thaliana columbia
cccctaggatggaaatacaagtctaaaatctacgatacttgttgctgtagccctaattcatgagacatcttgatacttgtactcaaaaaagctacttacacatttgatgatgatacttaaaagcctctccaaatgtagaatagtattgacagacacaaaagtgaaaccaaccttttccatttgctttgctctactggattccacgcactcggttttggaatactacaaggtcctagagtagcctgttaacatgtcaaggcagaagatttcagaattagtaaacatctttatcacaaagatgattgaataaattctctctcagtgactaaataatccagttttcgcatagcaatgatcccaagtataagcacagttccattgtctaatgtacggagcgagatcgtaccaacatctactgtagcaaattgcgaaagaagagaaatcaacagatccctatggaattcaattgaaatcgaattgacgaacctgctggtgcaacgtgtagagaagcaaagaggtatcgttggagaatttggagctgagttgtttgaccgacgattgagatccgtcgaggccgacgtacgatgcggcggcgtagaatctctccgggtaagaaaggccagagctcgctctcaccatgtgagccattttgtttccgttgatcggagatttgaggaggaagccacagtttcaagttttcggattaatactaatttggttttagttaattacgaaaacttgatgcagcgtttatatagcgcggcacgacaagttgctatttgcatgcatcaacttccaaaatccagtttctaacgtttttgactttttggcacaaaaagaatttattatgtctgactgataaat

SEQ ID NO: 30229 - DNA, 629 bp, Arabidopsis thaliana columbia
ctcaaataataagatcatgacaaaaactagtcttgatcaaaacgattttggtcgtctaaggttggaacttgaaacgatgttgaaaagaggggtcaagtttgagatcgaagcactctcagttcactcactgtcctttttgtcagaggtatatattccttctaagattcgtcgtgaagtaagctctccttgagcttcatacgagataactagtctccaactcaaggtaatgctcattgttttttttatgactctttctaagctttttagtgcaaaccaaatgcattggtagaatggacaaatgaacatagttttaatggaaaaatcataaatatacagattataaaaaataattctcagtttttaatttttaataatacaaagtacagtcactaatgactaatgagtaataagtttgaaattttgaataatacgacaataatttagcggaacatatgctgtatagtgataccaagcctaatatgaagtattagcgccgagcacctgactaacatcctgtgaacagtccgatccaagaataagcagataagaacctttgcatacagctaaatacgatgtcgtctctctgtcgctttctccttcgtggcaacttcagctacagcacccacacg

SEQ ID NO: 30230 - DNA, 524 bp, Arabidopsis thaliana columbia
atgactttcacaaaaatcatatgacactatactccaaacgagtggttctttaatacaagaactaggttaaaattcaggatgctagaactttgtattaaatggttcttttattcttttaagttaaataatacttttatcaaaaaagtttatattattagtggttccctgaagtaatatagttacattgatttattagtggaagaagaagaagataaaaaaccatgaaactgaaagtagtggatttggatatcgagaaactaggatatttgttgttagacatcggttaggggttccaagagtaaaggtgctttgcttgatttaatactctcttcagtctttactctcttgtcactttccaccttctttttcggttagtccattcccaaatacattcaaactcaatcttaaagaatgcgcacccgaaaaataaatgattaaactagaatctgtactaaaataaaacagaacacatcaaaaaattactagaaacaagaacctaaaaatcgataacatcaagcttgtaa

SEQ ID NO: 30231 - DNA, 911 bp, Arabidopsis thaliana columbia
gcaacacttcaacatattactaagaatgattcgaagaagtactttctcttacttgcttcttaccggtctagatgttcttcaagcttaaatactttccctttgtatatacgaagaccttcccatacagagtcaccgccttgcacgaccgagtcacaaacagaaaccttaagccagaataaagacaaataacatcagaacataagcataaacaagaaataacaaacagagatccatgtatggctcaagcaccttcgccatctctcgtggcacaatctcatcaccaacccaagcaagaagtttagcattttcaggaactgggagactgggaggaggtaaggtgctggacaagagcgatgacttgtgcttcatgtggcacctcagaatgttgtacagcggtaaacattgctccagcaaatcgtaatgcattaaagggaaagtctgaaagcaaaacaaaacacattgtagtttgaatgatgtctgagtttcaggatcttaaattgcagcgaaaacaggtcttgtacctgagggtacttctggggcgacgagaaccctgttgatttatgaagagtctcgtaccaccatggagcccaaagtccatcttctggtataggaccagcctcccatctttaagagaacgcaaacaataaagatacagtcattgcttttgccattaactgtcaaatcgaagagatcactagagcatagagggtctacttaagcatagaggcttgaaaggggatctctaagtcatcacaaagactgcgtagtgtagcctgaaaatagaagaatggcacagaacataagaatcttcttacataaaagaaatggtttccttgtgaaaatttcataatatagcaatgaaacctcgggatctcgctggagctcatctgcatcgatgattgctggtggtg

SEQ ID NO: 30232 - DNA, 947 bp, Arabidopsis thaliana
ccgagctcgaattcgctaaggaaacttggttttagtcacaagaacttaatgcttccttagatccgtctactaaaaattggaggataataatctataatctccttagatttgtcctagtatttaaatggagtctctcagatctcctactttccgacataccaaaagcaaaacaaagaaacttagtcttgtcttgtgtaccagacttttgtctcaatcatcttcattgtgaaggccatgcttgtacatgagctgttccaaagcctcatcaaattctttctccagatcaaatatctcctcgtgatgcctcttcttcatgtcttccatcttcttctcttgatcttttatcagcatctccctctcttccacaaactcctccatctctttctcttgaaactcgatgaagcttgacacttcctcagctctgcgaaagaatcaaaaccggaataattcagttactcttaggtttgaaaaacaaaaacgccagagggattatgttagttagtacatatacctctttcggcaatcgtcattgctagagggattaatgttctgctgctgctggccaacaaccttggcacgttcctgctgctgcaacatctcgaaattctcctcctttgcgtctcttctttcatggatctgtttgattgaatccatgaaaaacctgtcgtgtgcatccatcttcaaaccaccacaggttttttgttggacaatataatcaaaaatgtgaatcagtaggtaatacaaaatgtcaagtttgtgattttctaggaaaaatcatacctcttccctgttctgttcatgctgcatcttagttctctgtctcacgatccgattatcctctgcagttctacgcagcttctcgctcataatttccagagattcctcaagcaccttggcgtagttgttctgttttgagagcttgttcttaaagtagttcagctgctgat

SEQ ID NO: 30233 - DNA, 761 bp, Arabidopsis thaliana columbia
gcaaaggcaaatcctgcttggttgcgttgtggttcatgtcgcggttgactgtttgtattctgacaagaaacagtaaaaacagacaagtctttggagcaaaagaaaaacacattcgctggggaatttacatataccaatcgaagcattattattgtacatcaaccattatgacgtatcatggcgcgtagcttgttgctgatggttcctccatagatcaaatctgtctctcatcacatacaaatctcattttcatggggcttaaggtgggcttttataaaaaacaatttagcacaaattagagaacgtggagttgtattcgcggtcacggtaaaacgaaacggacataataaaaaaagtgtttgtgaatgttccaggaggaattgaaccaaaggttcggtataaaactaatagaggaaacgcttgccgtttaacgttttagctgctgcagtgccgtggcaagtcatgattggttgataaaattatagagtgattgggttcggggcactgcagcagctatgattcagaagtccgccgactcgccacggcacgaacccaatcaacctcatcactcattctaccgattttggcctcttttgtgaatagtttagcttttgtccttagggaagaaatgcgatgagtgatttcagggtttaggtctaaaaatacaaagagtgttagagtaagcaatcaagatagtaaactttgaaaacaacctctcagctcatttgatggaaaaccatactttgatcgaagactagaaa

SEQ ID NO: 30234 - DNA, 533 bp, Arabidopsis thaliana columbia
agtttcgatttcgaatcaaatatgaagctgaaagagtttttctgaatctttgtctttgtatccgttatctgaattctattcgccatggaagctgtgcttctctgctcgaagcttgttcctagagcggcgtcgttggaagggaaccaaaagttttcgttcaggcatttgaacaaacaccttaagtgcaattcccttcgtgctgattccagagacactccgttgctccgaggttttgaagcgataaagagtccgtctatctggagttgtgcgccgttcccagtgagaaaaggttcatgggttccacccagatgctcgatttctagctcgactgtttccgattccgataaccctttccttagccaatttcgaaccttctcttttgggtcaatggtgaagaaagttcgtgagttgaaagtgaagcccatggatgttgtgaagttaactcttttgctatcgattttgactgtggctgcaaaaaagactttgactttggtcttggaccattcttctggatgtattttagctggacatgg

SEQ ID NO: 30235 - DNA, 557 bp, Arabidopsis thaliana columbia
tctatgttgctgacaaaaaaaaaaaatcattcctcaaatttatcttctagttttgcattctcaaaatttgcattttctagtttccacaatttctaattgagaaaatttgcttacatagactgtttcttttcaataatagacaagtaaaaaagttacatattaatttttaatttttctcctaggaaaattaccactttttgaagcgacttctcctcttccagcggcttatacgaacctgggccaagtgcaaccggtcggtttcaacggctaagatcagccggcgtaaaaaagtcaacacaattagttgagccaatttatagaaccttcctcaatgtttacagttttgcccctgcataacttgtcaaagcccattacttttttaaaagaccttaagctattctacatattaccccactgggccagtttctcttagcccataggcccattgttagttaccgaacactgaagtaaaagaggttcacttctctctctttctatgtgaagtttatctgttttccagtttcgatttcgaatcaaatatgaagctgatagagttt

SEQ ID NO: 30236 - DNA, 573 bp, Arabidopsis thaliana columbia
tcaccattctgtgttgaccttgcttcacttatttctttcacctctacttcggtgtctcttggatcattattcacgtcctgaatatttgcatccctatctctcctgtcttcagtagtaatggaggcttcagcggaagaaacgcccatcaatatctctgaaggagttacaagatgagtggggtgtttgaaaaaagctgatgggcttcgcatcccagacacatcatcatcaggcgtaacatttgagtccttgcttcttgagatttcttctacggatgacacgtccaaatttctttctccaacagcatccatttgcctatcaacagagtaatcagcagaaggtgttttgccaccaagctcatgatgaggtattactggctcaatcgcctctacaggagtgtgatagccagaaagtttacttgatagtctgggactgagaggaagttggggtaaagtagcatacgcagaacctgcaccactggtttgagatggcaggccagaagttttaggttcaccgttgggtggaacaattgcttgtgatgtggttccgctgatggaaaactcaacttattagcac

SEQ ID NO: 30237 - DNA, 471 bp, Arabidopsis thaliana columbia
gatgattcatggatttatgttagagattttcattgtcctcactggtgcaggcagcttaatcacatatcgtagcagtcgcactcattctgtgctcataacgaggaaatgaattcatccttgtttaaccccgtttggattggagaaacgatacaacttcagcctggatgacctcaaagatgttgccaaaggctacgactgcttcatcaaggaagatgttctttgtacaacaatggtaaggaagagaagtgaggaagacgagttttgtcacactgatttcacgtaagatataagagaaaagatgttaagcttagggggttcaaagttgccttttaaagctccaatatatatagaaccaaattgcatttcatttgctgtttataaaaacagcccagtccaacatagaacgaatccgtgtacactccataatagttatatagaggagcagaaaaaatgactttcaaattaaaaaca

SEQ ID NO: 30238 - DNA, 616 bp, Arabidopsis thaliana columbia
aaaggcgacatggctattattatgctgatctgaaatgaagttctctctatagttcagttaccatgccactcgattctgggtccttggccgcgctggccgtgctggccgcggtcgcgacgcttgtcgggcgatcgcaggcgcactggacgtcctgaatcagatcaacagctcgatatgcacctggggccagctcagagcggccgttattcgcgataccgtctatctggacggcgggaacctggtttatcagaggtgaggctcgcatatcagatggtgacaggagggtttgatcaaactgaccccgcgcagaggcttctccaacggacaggtccaagtagacaacaacgacaatgccgaagtctcctttacaccctcgatctctcccaatccttcaacaccgagaacgacaatctcactgcgctcttcgatactttcgaaaaggcgggcggcattgcgggcaacatcgcgcctacctaccacgatgggttcatgttcgccaacgacaacttgttctatctctatgggtaagcgagtctctggaccctcggcaatcgatcgctgatttttgtaggggcttcttgatacactgacgattcgatgacctgccgagaatatg

SEQ ID NO: 30239 - DNA, 6143 bp, Arabidopsis thaliana columbia
atatatcaaagctcttataaagaagattgggtattcctacataggtgttgggacccacgacaaatggatcataaagtctttaaaaaagaatagatacgattgcattgcatttaataacagatgcgatcataccagcactaatgcaccggatcccattagaactccgcagttaagcatgcttcggcgagagtagtactaggatgggtgacctcccggaaagtcctcgtgttgcatcccttttttttcggtttttctctttattttttgttaaaaaagtatgactctataacctttagaccgtgaggccaaacttggcatgtgataccttttcggaaagcccaaagagagctctccaatgaatgaggaaggacaatggaattcttctattggttttttactactccaaattttgaccttaatgtactttttcatgccttttcgtgatctttgctatattacggggaggaaattatatgttcggacattggtttccaatattttgcatgtaaccaaagcccttatataaagatagggtttcctcatatcgggtgggaccacggcaaatggatcattaaatcttcagaaaagaatagatacgattgcattgcatgtagtaccagatgcgatcataccaacaataatgcaccggatgcaatcagaactccgcagttaagtgtgcttcggcgagagttgtactaggatgggtgacctccaggaaagtcctcgtgttacatccctctttttttccgtgtttctcttctttgtttgttaaaaatgtatgactctataacttttagaccgtgaggccaaacttggcatgtgatacctttttggaaagcccaaaaagaactctccgatgattgaggaaggaaaatggaattctcctattgtttttgtttcctactctaaatttttaccttaatgtactttttgtggccttttcgtgatctttgctatattactgggcaaaacttatacgttccaacattgttttcgaatattttggatgtatcaaagctcttataaacaagattgggtattcctacatagctggtgggacccacggcaaatggatcataaagtctttaaaaaagaatagatacgattacattgcatgtagtaacacatgcgatcataccagcactaatgcatcggatcccatcagaactccgcagttaagggtgcttgggcgagagtagtactaggatggattacctcccggaaagtcctcgtgttgcatccctcttttttttcggtttttctctattttgtattgttaaaaatgtatgactctataacttttagaccgtgaggccaaacttggcatgtgatacctttttggaaagcccaaagagagctctccgatgactgaggaagggaaatggaattcttctattgttttttcttctactccaaattttgaactaaatgtaccttttcgggccttttcgtgatctttgctatattacggggggaaaactatatgttcggacattgttttccaatattttgcatgtatgaaaactcttataaagaagatagggtattcctacatagctggtgggacccacggcaaatggatcataaagtctttaaaagcaatagatacgattacattgcatgtagtaacacatgcgatcataccagcactaatgcaccggatcccatcagaactccgcagttaagggtgcttgggcgagagtagtactaggatgggtgacttcccagaaagtcctcgtgttgcatccctcgtttttttggtttttctctattttgttttgttaaaaatgtatgactctataacttttagaccgtgaggctaaacatggcatgtgataccttttcggaaagcccaaagagagctctccaatgaatgaggaaggaaaatggaattcttctttttgttttttttcaactccaaattttgacctaaatgtacttttttgggccttttcgtgatctttgctatattacggggggaaaattatatgttcggacattgttttccaatattttgcatgtatcaaagctcttataaagaagatagggtattcctacatagctggtgggacccacggcaaatggatcatataatctttaaaaaagaatagatacgattacattgcatgtagtaacacatgcgatcataccagcactaatgcactggatcccatcagaactccgcagttaagggtgcttgggcgagagtagtactaggatgggtgacctcccggaaagtcctcgtgttgcatccctctctttttttggtttttctctattttgttttgttaaaaatgtatggctctataacttttagaccgtgaggccaaacttggcatgtgataccttttcggaaagcccaaagagagctctctgatgactgaggaaggaaaatggaattcttctattgctttttttttctactccaaattttgacctaaatgtactttttcgggccttttcgcgatctttgctatattacggggggaaaattatatgttcggatgttgtttaccaatattttgcatgtatcaaagctcctataaagaagatagggtattcctacatagctggtgggacccacggcaactagatcataaaatctttaaataagaataaatatgattacattgcatgtagtaacacatgcgatcataccagcactaatgcaccggatcccatcagaactccgcagttaagggtgcttgggcgagagtagtactaggatgggtgacttcccggaaagtcctcgtgttgcatctctcgttttttttggtttttctctattttgttttgttaaaaatgtatgactctataacttttagaccgtgaggctaaacatggcatgtgataccttttcggaaagcccaaagagagctctccgatgtatgaggaaggaaaatggaattcttctttttgttttttttcaactccaaattttgacctaaatgtacttttttgggctttttcgtgatcttaactatattacgaggggaaaattatatgttcagacattgttttccaatattttgcatgtatcaaagctcttataaagaagatagggtattcctacatagctggtgggacccacggcaaatggatcataaagtctttaaaaaaaaatagatacgattacattgcatgtagtaacagatgcgatcataccagcactaatgcaccggatcccatcagaactccgcagttaagggtgctggggcgagagtagtactaggatgggtgacttcccggaaagtcctcgtgttgcatccctcgttttttttggtttttctctattttgttttgttaaaaatgtatgactctataacttttagaccgtgaggctaaacatggcatgtgataccttttcggaaagcccaaagagagctctccgatgaatgaggaaggaaaatggaattcttctttttgttttttttcaactccaaattttgacctaaatgtacttttttgggctttttcgtgatcttaactttattacgtggggaaaattatatgttcggacattgttttccaatattttgcatgtatcaaagctcttataaagaagatagggtattcctacatagctagtgggacccacggcaaatggatcataaagtctttaaaaaagaatagatacgattacattgcatgtagtaacacatgcgatcataccagcactaatgcaccggatcccatcagaactccgcagttaagggtgcttgggcgagagtagtactaggatgggtgacttcccggaaagtcctcgtgttgcatccctcgttttttttggtttttctctattttgttttgttaaaaatgtatgactctataacttttagaccgtgaggctaaacatggcatgtgataccttttcggaaagcccaaagagagctctccgatgaatgaggaaggaaaatggaattcttctttttgttttttttcaactccaaattttgacctaaatgtacttttttgggctttttcgtgatcttagctatattacggggggaaaattatatgttcggacattgttttccaatattttgcatgtatcaaagctcttataaagaagatagggtattcctacatagctggtgggacccacggcaaatggatcataaaatctttaaaaaagaatagatacgattacattgcatgtagtaacacatgcgatcataccagcactaatgcactggatcccatcagaactccgcagttaagggtgcttgggcgagagtagtactaggatgggtgacctcccggaaagtccttgtgttgcatccctcttttttcggtttttctctattttgttttgttaaaaatgtatgactctataacttttagttcgtgaggccaaacttggcatgagataccttttcggaaagcccaaagagagctctccgatgattgaggaaggaaaatggaattcttctattgtttttttttctactccaaattttgaactaaatgtactttttcgggccttttcgtgatctttgctatattacggggggaaaattatatgttcggacattgttttccaatattttgcatttatcaaagctcttataaagaagctagggtattcctacatagctggtgggacccacggcaaatggatcatataatctttaaaaaagaatagatacgattacattgcatgtagtaacacatgcgatcataccagcactaatgcactggatcccatcagaactccgcagttaagggtgcttgggcgagagtagtactaggatgggtgacctcccggaaagtcctcgtgttgcatccctctctttttttggtttttctctattttgttttgttaaaaatgtatggctctataacttttagaccgtgaggccaaacttggcatgtgataccttttcggaaagcccaaagagagctctccgatgaatgacgaaggaaaatggaattcttatactggtttttttctactccaaattttgaactaaatgtactttttcgggccttttcgtgatctttgctatattatgggggaaaaattatatcttcggacattgttttccaatattttacatgtatcaaagctcttataaagaagatagggtattcctacatagctgtgggacccacggcaaatggatcataaagtctttaaaaagaatagatacgattacattgcatgtagtaacacatgcgatcataccaacactaatgcaccggatcccataagaactccgcagttaagggtgcttgggcaagagtagtactaggatgggtgacctcccggaatgtcctcgtgttacatccctcttttttcccgtttttctctattttgttttgttaaaaatgtatgactctataacttttagaccgtgaggccaaacttggcatgtgataccttttcggaaagcccaaagagagctctccgatgactaaggaagtaaaatggaattcttctattggttttttttcgactccaaattttgaacataatgtactttttcgggccttttcgtgatctttgctatattatggggggaaaattatatcttcggacattgttttccaatattatgcatgtatgaaagctcttataaagaaggtagggtattcctacatagctggtaggacccactgcaaatggatcataaagtctttaaaaaagaatagatacgattacattgcatgtagtgacacatgcgatcataccaacactaatgcaccggatcccatcataactccgcagttaagggtgcttgggcgagagtagtactaggatgggtgacttcccggaaagtcctcgtgttgcctcccttgttttttctggtttttctctattttgttttgttaaaaatgtatgactctataacttttggaccgtgaggctaaacatggcatgtgataccttttcggaaagcccaaagagagctctccgatgaatgaggaaggaaaatggaattcttctttttgttgttttttcaactccaaattttgacctaaatgtagttttttgggctttttcgtaatcttaactatattacggggggaaaattatatgttcggacattgttttccaatattttgcatgtatctaagctcttataaagaagatagggtattcctacatagctggtgggacccacggcaaatggatcata

SEQ ID NO: 30240 - DNA, 518 bp, Arabidopsis thaliana columbia
gtttatgaaaacaaaattcaagaatgatgaaatttaaaattaagatcgtttatagttgttaattttaatatttttttatgataatagttacatttctttatgtactatatactttcatttttattatatattcatacaaaaaataactttcaaattaattgtcacatgaaatgaatgttatgactttatttaaactagtattgatacttaaaaaaaaaagatatgttttcaggtgaattttatattaaccttttttctttgaatataatttaacattaaatttgaaaaaagtattaaaattactactaaaattttatttaaaataaacatcaataataaatatttcagaagagactaaattcattaaatgaattgttttcaactacattgtgttcatttccactttttctcttatcatttcgttcttattattatttgatgatcaccactcaccaccaatgtgtggtaataaaaaaatccaatactactagctagctctaaaagatatattggttttg

SEQ ID NO: 30241 - DNA, 472 bp, Arabidopsis thaliana columbia
cagtaactgttcttgtcagatttgtccacgtcgagagactagactcagtcttatcttttagtcctctgcaaaaaaaaaaaaaaaactttactgttttctgttaaaaacaaagaaacccaaatagtaaaaagttctagagagtaggttcatagttcaaagattagctttttaactgtgttcagaagcagcacatgagtaacatggcttcgtttttgggaccagtggtttcaaaagtggtgtctttggtcattttgtctgaagttactttggtcccttaattcttaaaagactctgaccaaaactctaatcaaatgactaaaattaaaccaagtaactgataaattatcaaaaacttagctatattgaagagcttgttgcttaataactcgagtcattgatatggttgatgagactttggctaatattacaaatattcaaatggttaagagagttgtcaaatctcgactagaat

SEQ ID NO: 30242 - DNA, 826 bp, Arabidopsis thaliana columbia
gtcctactctattgaaacggctaaccccagaaactccatagcctcgatcatcgtcttgagatacctcttcaagcccaacatctgcaggactaactgagtctgcacacaataatgaccaaaaaacaaatcacacttcttcctataaaacatacattcccctaattctaacttcaactctcaccacaatgaaccatataatcactgatcctagtagtccctctatgaagaatagattgatatattaatatatgatatttcttctctaaaaatcctaaatttgcatcatgtatacatcaaagttacaagatttgcacttctcagagactctgacgatttcaaattgtgaatctgcaattggccagatttggtggatcaaatgagtttccacatttattcaaatccaacaaaacaacgttaaaccctttaactaggtcactgattcgatcaaaactagctgcaattgcaataaccctatcgcagtaggagacaatcaaacagagacaaaagaagagagaaaaatacccaacacagagcatagcttttggatagccatggaagcaggagaaggagctttgccagtgaaagtctctttgcagaggtcgtaaagctcttgcactttgggagatttctcctgattcctcgacgtcatgtaaatgtccttcttgctaacgagattcgacaacaccttatcacctgccttgaacaatctcgacaacatcttttgtatctctcttcaaactttttgtgtgtcggtaactgttcgaatgtcatatccgagagtgattaactatgaatttagtggggtgggctccatacatgagtaatg
